(19) United States
(12) Patent Application Publication
(10) Pub. No.: US 2025/0312441 A1
(43) Pub. Date: Oct. 9, 2025

(54) IMMUNOGENIC COMPOSITIONS FOR HERPES SIMPLEX VIRUS PROTEINS

(71) Applicant: MERCK SHARP & DOHME LLC, Rahway, NJ (US)

(72) Inventors: Constantine James KONSTANTOULAS, Vienna (AT); Sabrina SCHRAUF, Mörbisch am See (AT); Dai WANG, Blue Bell, PA (US)

(73) Assignee: MERCK SHARP & DOHME LLC, Rahway, NJ (US)

(21) Appl. No.: 18/874,243

(22) PCT Filed: Jun. 22, 2023
(86) PCT No.: PCT/US2023/025920

§ 371 Date: Dec. 12, 2024

Related U.S. Application Data
(60) Provisional application No. 63/354,852, filed on Jun. 23, 2022.

(51) Int. Cl. A61K 39/245; A61P 37/04; C07K 14/005; C12N 15/86

(52) U.S. Cl. CPC A61K 39/245; A61P 37/04; C07K 14/005; C12N 15/86; C12N 2710/16622; C12N 2710/16634; C12N 2760/18443

(57) ABSTRACT

The disclosure provides live attenuated measles vectors encoding in their genome one or more heterologous genes for herpes simplex virus (HSV) proteins, e.g., glycoprotein B, glycoprotein C, glycoprotein D, and variants thereof, as well as nucleic acid constructs encoding such measles vectors. The disclosure also relates to immunogenic compositions comprising live attenuated measles vectors encoding HSV proteins, immunogenic compositions comprising such measles vectors, and use of such measles vectors and immunogenic compositions to induce an immune response to HSV in subjects.

### FIELD

[0001] This disclosure relates generally to viral vector-based immunogenic compositions against Herpes Simplex Virus.

### BACKGROUND OF THE INVENTION

[0002] Herpes simplex viruses (HSV) are double-stranded linear DNA viruses in the Herpesviridae family. Two members of the herpes simplex virus family infect humans, known as HSV-1 and HSV-2. Symptoms of HSV infection include the formation of blisters in the skin or mucous membranes of the mouth, lips, and/or genitals. HSV is a neuro-invasive virus that can cause sporadic recurring episodes of viral reactivation in infected individuals. HSV is transmitted by contact with an infected area of the skin during a period of viral activation. Despite a primed immune system, reactivation of the virus is frequent, often leading to lesions at the original site of infection.

[0003] The World Health Organization estimated that in 2022, 491 million people worldwide were infected with HSV-2, and 3.7 billion people under the age of 50 worldwide were infected with HSV-1. HSV-2 infection results in an approximately 3-fold increase in the risk of acquiring HIV. However, no HSV vaccine currently exists. Accordingly, there is a need for a vaccine that can reduce the prevalence of HSV infection.

### SUMMARY OF THE INVENTION

[0004] In a first aspect, the disclosure provides an isolated nucleic acid molecule comprising: a) a cDNA encoding a full length, antigenomic (+) RNA strand of an attenuated strain of measles virus (MV-cDNA); b) one or more cDNAs encoding an herpes simplex virus (HSV) protein (HSV cDNA) selected from the group consisting of: gC, gD, gB, UL19, and variants thereof; c) an upstream additional transcriptional unit (ATU) cDNA operably linked to the HSV cDNA that is 5′ of the HSV cDNA (upstream ATU cDNA); and d) a downstream ATU cDNA operably linked to the HSV cDNA that is 3′ of the HSV cDNA (downstream ATU cDNA); wherein the upstream ATU cDNA, the HSV cDNA, and the downstream ATU cDNA are between P and M genes of the MV-cDNA at ATU2 or between H and L genes of the MV-cDNA at ATU3.

[0005] In some embodiments of the first aspect, each of the one or more HSV cDNAs encodes an HSV protein sequence independently selected from the group consisting of: SEQ ID NO: 54 (HSV-2 gC, wild-type); SEQ ID NO: 57 (HSV-2 gC F327A); SEQ ID NO: 55 (HSV-2 gB, wild-type); SEQ ID NO: 58 (HSV-2 gBmut); SEQ ID NO: 58.1 (HSV-2 gBmutdel25); SEQ ID NO: 64 (HSV-2 gBwtdel25); SEQ ID NO: 56 (HSV-2 gD, wild-type); and SEQ ID NO: 65 (HSV-2 UL19). In some embodiments of the first aspect, the upstream ATU cDNA, the HSV cDNA, and the downstream ATU cDNA is at ATU2 in the MV-cDNA. In some embodiments of the first aspect, the upstream ATU cDNA, the HSV cDNA, and the downstream ATU cDNA is at ATU3 in the MV-cDNA. In some embodiments of the first aspect, the upstream ATU cDNA sequence is set forth in SEQ ID NO: 87. In some embodiments of the first aspect, the downstream ATU cDNA sequence is set forth in SEQ ID NO: 90. In some embodiments of the first aspect, the isolated nucleic acid molecule comprises a sequence selected from the group consisting of SEQ ID NOs: 59-63 and 96-97. In some embodiments of the first aspect, the isolated nucleic acid molecule comprises a sequence set forth in SEQ ID NO: 59. In some embodiments of the first aspect, the isolated nucleic acid molecule consists of a sequence set forth in SEQ ID NO: 59. In some embodiments of the first aspect, the isolated nucleic acid molecule comprises a sequence set forth in SEQ ID NO: 60. In some embodiments of the first aspect, the isolated nucleic acid molecule consists of a sequence set forth in SEQ ID NO: 60. In some embodiments of the first aspect, the isolated nucleic acid molecule comprises a sequence set forth in SEQ ID NO: 61. In some embodiments of the first aspect, the isolated nucleic acid molecule consists of a sequence set forth in SEQ ID NO: 61. In some embodiments of the first aspect, the isolated nucleic acid molecule comprises a sequence set forth in SEQ ID NO: 62. In some embodiments of the first aspect, the isolated nucleic acid molecule consists of a sequence set forth in SEQ ID NO: 62. In some embodiments of the first aspect, the isolated nucleic acid molecule comprises a sequence set forth in SEQ ID NO: 63. In some embodiments of the first aspect, the isolated nucleic acid molecule consists of a sequence set forth in SEQ ID NO: 63.

[0006] In a second aspect, the disclosure provides an isolated nucleic acid molecule comprising: a) a cDNA encoding a full length, antigenomic (+) RNA strand of an attenuated strain of measles virus (MV-cDNA); b) a first cDNA encoding an herpes simplex virus (HSV) protein selected from the group consisting of: gC, gD, gB, UL19, and variants thereof (first HSV cDNA); c) a second cDNA encoding an HSV protein selected from the group consisting of: gC, gD, gB, UL19, and variants thereof (second HSV cDNA), wherein the first and second HSV cDNAs do not have the same sequence; d) an upstream additional transcriptional unit (ATU) cDNA that is 5′ of the first HSV cDNA (upstream ATU cDNA); e) a downstream ATU cDNA that is 3′ of the second HSV cDNA (downstream ATU cDNA); and f) an interstitial ATU cDNA between the first and second HSV cDNAs (interstitial ATU cDNA); wherein the upstream ATU cDNA, the first and second HSV cDNAs, the interstitial ATU cDNA and the downstream ATU cDNA are operably linked; and wherein the upstream ATU cDNA, the first and second HSV CDNAs, the interstitial ATU cDNA, and the downstream ATU cDNA are between P and M genes of the MV-cDNA at ATU2 or between H and L genes of the MV-cDNA at ATU3.

[0007] In some embodiments of the second aspect, the first and second HSV cDNAs each encode an HSV protein sequence independently selected from the group consisting of: SEQ ID NO: 54 (HSV-2 gC, wild-type); SEQ ID NO: 57 (HSV-2 gC F327A); SEQ ID NO: 55 (HSV-2 gB, wild-type); SEQ ID NO: 58 (HSV-2 gBmut); SEQ ID NO: 100 (HSV-2 gBmutdel25); SEQ ID NO: 64 (HSV-2 gBwtdel25); SEQ ID NO: 56 (HSV-2 gD, wild-type); and SEQ ID NO: 65 (HSV-2 UL19). In some embodiments of the second aspect, the upstream ATU cDNA, the first and second HSV cDNAs, and the downstream ATU cDNA are at ATU2 in the MV-cDNA. In some embodiments, the upstream ATU cDNA, the first and second HSV cDNAs, and the downstream ATU cDNA are at ATU3 in the MV-cDNA. In some embodiments of the second aspect, the upstream ATU cDNA sequence is set forth in SEQ ID NO: 87. In some embodiments of the second aspect, the downstream ATU cDNA sequence is set forth in SEQ ID NO: 90. In some embodiments of the second aspect, the interstitial ATU cDNA sequence is selected from the group consisting of SEQ ID NOs: 83, 87, 90, and 92. In some embodiments of the second aspect, the isolated nucleic acid molecule comprises a sequence selected from the group consisting of SEQ ID NOs: 66, 68, 69, and 70. In some embodiments of the second aspect, the isolated nucleic acid molecule comprises a sequence set forth in SEQ ID NO: 66. In some embodiments of the second aspect, the isolated nucleic acid molecule consists of a sequence set forth in SEQ ID NO: 66. In some embodiments of the second aspect, the isolated nucleic acid molecule comprises a sequence set forth in SEQ ID NO: 68. In some embodiments of the second aspect, the isolated nucleic acid molecule consists of a sequence set forth in SEQ ID NO: 68. In some embodiments of the second aspect, the isolated nucleic acid molecule comprises a sequence set forth in SEQ ID NO: 69. In some embodiments of the second aspect, the isolated nucleic acid molecule consists of a sequence set forth in SEQ ID NO: 69. In some embodiments of the second aspect, the isolated nucleic acid molecule comprises a sequence set forth in SEQ ID NO: 70. In some embodiments of the second aspect, the isolated nucleic acid molecule consists of a sequence set forth in SEQ ID NO: 70.

[0008] In a third aspect, the disclosure provides an isolated nucleic acid molecule comprising: a) a cDNA encoding a full length, antigenomic (+) RNA strand of an attenuated strain of measles virus (MV-cDNA); b) a first cDNA encoding an herpes simplex virus (HSV) protein (HSV cDNA) selected from the group consisting of: gC, gD, gB, UL19, and variants thereof (first HSV cDNA); c) a second HSV cDNA encoding an HSV protein selected from the group consisting of: gC, gD, gB, UL19, and variants thereof (second HSV cDNA), wherein the first and second HSV cDNAs do not have the same sequence; d) an upstream additional transcriptional unit (ATU) cDNA that is 5′ of the first HSV cDNA (upstream ATU cDNA); e) a downstream ATU cDNA that is 3′ of the second HSV cDNA (downstream ATU cDNA); and f) a furin cleavage site cDNA and 2A peptide cDNA between the first and second HSV cDNAs (Fur-2A cDNA); wherein the upstream ATU cDNA, the first and second HSV CDNAs, the Fur-2A cDNA, and the downstream ATU cDNA are operably linked; and wherein the upstream ATU cDNA, the first and second HSV cDNAs, the Fur-2A cDNA, and the downstream ATU cDNA are between P and M genes of the MV-cDNA at ATU2 or between H and L genes of the MV-cDNA at ATU3.

[0009] In some embodiments of the third aspect, the first and second HSV cDNAs each encode an HSV protein sequence independently selected from the group consisting of: SEQ ID NO: 54(HSV-2 gC, wild-type); SEQ ID NO: 57 (HSV-2 gC F327A); SEQ ID NO: 55 (HSV-2 gB, wild-type); SEQ ID NO: 58 (HSV-2 gBmut); SEQ ID NO: 100 (HSV-2 gBmutdel25); SEQ ID NO: 64 (HSV-2 gBwtdel25); SEQ ID NO: 56 (HSV-2 gD, wild-type); and SEQ ID NO: 65 (HSV-2 UL19). In some embodiments of the third aspect, the upstream ATU cDNA, the first and second HSV cDNAs, the Fur-2A cDNA, and the downstream ATU cDNA are at ATU2 in the MV-cDNA. In some embodiments of the third aspect, the upstream ATU cDNA, the first and second HSV cDNAs, the Fur-2A cDNA, and the downstream ATU cDNA are at ATU3 in the MV-cDNA. In some embodiments of the third aspect, the upstream ATU cDNA sequence is set forth in SEQ ID NO: 87. In some embodiments of the third aspect, the downstream ATU cDNA sequence is set forth in SEQ ID NO: 90. In some embodiments of the third aspect, the furin cDNA of the Fur-2A cDNA encodes a protein sequence selected from the group consisting of SEQ ID NOs: 14-53, and wherein the 2A peptide cDNA of the Fur-2A cDNA encodes a protein sequence selected from the group consisting of SEQ ID NOs: 4-11.

[0010] In a fourth aspect, the disclosure provides an isolated nucleic acid molecule comprising: a) a cDNA encoding a full length, antigenomic (+) RNA strand of an attenuated strain of measles virus (MV-cDNA); b) a first cDNA encoding an herpes simplex virus (HSV) protein selected from the group consisting of: gC, gD, gB, UL19, and variants thereof (first HSV cDNA); c) a second HSV cDNA encoding an HSV protein selected from the group consisting of: gC, gD, gB, UL19, and variants thereof (second HSV cDNA); d) a third HSV cDNA encoding an HSV protein selected from the group consisting of: gC, gD, gB, UL19, and variants thereof (third HSV cDNA), wherein the first, second, and third HSV cDNAs do not have the same sequence; e) an upstream additional transcriptional unit (ATU) cDNA that is 5′ of the first HSV cDNA (upstream ATU cDNA); f) a downstream ATU cDNA that is 3′ of the third HSV cDNA (downstream ATU cDNA); g) a first interstitial ATU cDNA between the first and second HSV protein cDNAs (first interstitial ATU cDNA); h) a second interstitial ATU cDNA between the second and third HSV CDNAs (second interstitial ATU cDNA); wherein the upstream ATU cDNA, the first, second, and third HSV cDNAs, the first and second interstitial ATU cDNAs, and the downstream ATU cDNA are operably linked; and wherein the upstream ATU cDNA, the first, second, and third HSV cDNAs, the first and second interstitial ATU cDNAs, and the downstream ATU cDNA are between P and M genes of the MV-cDNA at ATU2 or between H and L genes of the MV-cDNA at ATU3.

[0011] In some embodiments of the fourth aspect, the first, second, and third HSV CDNAs each encode an HSV protein sequence independently selected from the group consisting of: SEQ ID NO: 54 (HSV-2 gC, wild-type); SEQ ID NO: 57 (HSV-2 gC F327A); SEQ ID NO: 55 (HSV-2 gB, wild-type); SEQ ID NO: 58 (HSV-2 gBmut); SEQ ID NO: 100 (HSV-2 gBmutdel25); SEQ ID NO: 64 (HSV-2 gBwtdel25); SEQ ID NO: 56 (HSV-2 gD, wild-type); and SEQ ID NO: 65 (HSV-2 UL19). In some embodiments of the fourth aspect, the upstream ATU cDNA, the first, second, and third HSV cDNAs, and the downstream ATU cDNA are at ATU2 in the MV-cDNA. In some embodiments of the fourth aspect, the upstream ATU cDNA, the first, second, and third HSV cDNAs, and the downstream ATU cDNA are at ATU3 in the MV-cDNA. In some embodiments of the fourth aspect, the upstream ATU cDNA sequence is set forth in SEQ ID NO: 87. In some embodiments of the fourth aspect, the downstream ATU cDNA sequence is set forth in SEQ ID NO: 90. In some embodiments of the fourth aspect, the first and second interstitial ATU cDNA sequences are independently selected from the group consisting of SEQ ID NOs: 83, 87, 90, and 92. In some embodiments of the fourth aspect, the isolated nucleic acid molecule comprises a sequence selected from the group consisting of SEQ ID NOs: 71, 75, 76, 79, and 80. In some embodiments of the fourth aspect, the isolated nucleic acid molecule comprises a sequence set forth in SEQ ID NO: 71. In some embodiments of the fourth aspect, the isolated nucleic acid molecule consists of a sequence set forth in SEQ ID NO: 71. In some embodiments of the fourth aspect, the isolated nucleic acid molecule comprises a sequence set forth in SEQ ID NO: 75. In some embodiments of the fourth aspect, the isolated nucleic acid molecule consists of a sequence set forth in SEQ ID NO: 75. In some embodiments of the fourth aspect, the isolated nucleic acid molecule comprises a sequence set forth in SEQ ID NO: 76. In some embodiments of the fourth aspect, the isolated nucleic acid molecule consists of a sequence set forth in SEQ ID NO: 76. In some embodiments of the fourth aspect, the isolated nucleic acid molecule comprises a sequence set forth in SEQ ID NO: 79. In some embodiments of the fourth aspect, the isolated nucleic acid molecule consists of a sequence set forth in SEQ ID NO: 79. In some embodiments of the fourth aspect, the isolated nucleic acid molecule comprises a sequence set forth in SEQ ID NO: 80. In some embodiments of the fourth aspect, the isolated nucleic acid molecule consists of a sequence set forth in SEQ ID NO: 80.

[0012] In a fifth aspect, the disclosure provides an isolated nucleic acid molecule comprising: a) a cDNA encoding a full length, antigenomic (+) RNA strand of an attenuated strain of measles virus (MV-cDNA); b) a first cDNA encoding an herpes simplex virus (HSV) protein selected from the group consisting of: gC, gD, gB, UL19, and variants thereof (first HSV cDNA); c) a second HSV cDNA encoding an HSV protein selected from the group consisting of: gC, gD, gB, UL19, and variants thereof (second HSV cDNA); d) a third HSV cDNA encoding an HSV protein selected from the group consisting of: gC, gD, gB, UL19, and variants thereof (third HSV cDNA), wherein the first, second, and third HSV cDNAs do not have the same sequence; e) an upstream additional transcriptional unit (ATU) cDNA that is 5′ of the first HSV cDNA (upstream ATU cDNA); f) a downstream ATU cDNA that is 3′ of the third HSV cDNA (downstream ATU cDNA); g) a first furin cleavage site cDNA and 2A peptide cDNA between the first and second HSV cDNAs (first Fur-2A cDNA); and h) a second furin cleavage site cDNA and 2A peptide cDNA (second Fur-2A cDNA) between the second and third HSV cDNAs (second Fur-2A cDNA); wherein the upstream ATU cDNA, the first, second, and third HSV cDNAs, the first and second Fur-2A cDNAs, and the downstream ATU cDNA are operably linked; and wherein the upstream ATU cDNA, the first, second, and third HSV cDNAs, the first and second Fur-2A cDNAs, and the downstream ATU cDNA are between P and M genes of the MV-cDNA at ATU2 or between H and L genes of the MV-cDNA at ATU3.

[0013] In some embodiments of the fifth aspect, the first and second HSV cDNAs each encode an HSV protein sequence independently selected from the group consisting of: SEQ ID NO: 54 (HSV-2 gC, wild-type); SEQ ID NO: 57 (HSV-2 gC F327A); SEQ ID NO: 55 (HSV-2 gB, wild-type); SEQ ID NO: 58 (HSV-2 gBmut); SEQ ID NO: 100 (HSV-2 gBmutdel25); SEQ ID NO: 64 (HSV-2 gBwtdel25); SEQ ID NO: 56 (HSV-2 gD, wild-type); and SEQ ID NO: 65 (HSV-2 UL19). In some embodiments of the fifth aspect, the upstream ATU cDNA, the first, second, and third HSV cDNAs, the first and second Fur-2A cDNAs, and the downstream ATU cDNA are at ATU2 in the MV-cDNA. In some embodiments of the fifth aspect, the upstream ATU cDNA, the first, second, and third HSV cDNAs, the first and second Fur-2A cDNAs, and the downstream ATU cDNA are at ATU3 in the MV-cDNA. In some embodiments of the fifth aspect, the upstream ATU cDNA sequence is set forth in SEQ ID NO: 87. In some embodiments of the fifth aspect, the downstream ATU cDNA sequence is set forth in SEQ ID NO: 90. In some embodiments of the fifth aspect, the furin cDNA of the first and second Fur-2A cDNAs encodes a protein sequence independently selected from the group consisting of SEQ ID NOs: 14-53, and wherein the 2A peptide cDNA of the first and second Fur-2A cDNAs is independently selected from the group consisting of SEQ ID NOs: 4-11. In some embodiments of the fifth aspect, the isolated nucleic acid molecule comprises the sequence set forth in SEQ ID NO: 82. In some embodiments of the fifth aspect, the isolated nucleic acid molecule consists of the sequence set forth in SEQ ID NO: 82.

[0014] In a sixth aspect, the disclosure provides an isolated nucleic acid molecule comprising: a) a cDNA encoding a full length, antigenomic (+) RNA strand of an attenuated strain of measles virus (MV-cDNA); b) a first cDNA encoding an herpes simplex virus (HSV) protein selected from the group consisting of: gC, gD, gB, UL19, and variants thereof (first HSV cDNA); c) a second HSV cDNA encoding an HSV protein selected from the group consisting of: gC, gD, gB, UL19, and variants thereof (second HSV cDNA); d) a third HSV cDNA encoding an HSV protein selected from the group consisting of: gC, gD, gB, UL19, and variants thereof (third HSV cDNA), wherein the first, second, and third HSV cDNAs do not have the same sequence; e) an upstream additional transcriptional unit (ATU) cDNA that is 5′ of the first HSV cDNA (upstream ATU cDNA); f) a downstream ATU cDNA that is 3′ of the third HSV cDNA (downstream ATU cDNA); g) a furin cleavage site cDNA and 2A peptide cDNA (Fur-2A cDNA); and h) an interstitial ATU cDNA; wherein the upstream ATU cDNA, the first, second, and third HSV CDNAs, the Fur-2A cDNA, the interstitial ATU cDNA, and the downstream ATU cDNA are operably linked; wherein i) the Fur-2A cDNA is between the first and second HSV cDNAs and the interstitial ATU cDNA is between the second and third HSV cDNAs, or ii) the interstitial ATU cDNA is between the first and second HSV cDNAs and the Fur-2A cDNA is between the second and third HSV cDNAs; and wherein the upstream ATU cDNA, the first, second, and third HSV cDNAs, the Fur-2A cDNA, the interstitial ATU cDNA, and the downstream ATU cDNA are between P and M genes of the MV-cDNA at ATU2 or between H and L genes of the MV-cDNA at ATU3.

[0015] In some embodiments of the sixth aspect, the first and second HSV cDNAs each encode an HSV protein sequence independently selected from the group consisting of: SEQ ID NO: 54(HSV-2 gC, wild-type); SEQ ID NO: 57 (HSV-2 gC F327A); SEQ ID NO: 55 (HSV-2 gB, wild-type); SEQ ID NO: 58 (HSV-2 gBmut); SEQ ID NO: 100 (HSV-2 gBmutdel25); SEQ ID NO: 64 (HSV-2 gBwtdel25); SEQ ID NO: 56 (HSV-2 gD, wild-type); and SEQ ID NO: 65 (HSV-2 UL19). In some embodiments of the sixth aspect, the upstream ATU cDNA, the first, second, and third HSV cDNAs, the Fur-2A cDNA, the interstitial ATU cDNA, and the downstream ATU cDNA are at ATU2 in the MV-cDNA. In some embodiments of the sixth aspect, the upstream ATU cDNA, the first, second, and third HSV cDNAs, the Fur-2A cDNA, the interstitial ATU cDNA, and the downstream ATU cDNA are at ATU3 in the MV-cDNA. In some embodiments of the sixth aspect, the upstream ATU cDNA sequence is set forth in SEQ ID NO: 87. In some embodiments of the sixth aspect, the downstream ATU cDNA sequence is set forth in SEQ ID NO: 90. In some embodiments of the sixth aspect, the furin cDNA of the Fur-2A cDNA encodes a protein sequence selected from the group consisting of SEQ ID NOs: 14-53, and wherein the 2A peptide cDNA of the Fur-2A cDNA encodes a protein sequence selected from the group consisting of SEQ ID NOs: 4-11. In some embodiments of the sixth aspect, the interstitial ATU cDNA sequence is selected from the group consisting of SEQ ID NOs: 83, 87, 90, and 92. In some embodiments of the sixth aspect, the Fur-2A cDNA is between the first and second HSV cDNAs and the interstitial ATU cDNA is between the second and third HSV cDNAs. In some embodiments of the sixth aspect, the interstitial ATU cDNA is between the first and second HSV cDNAs and the Fur-2A cDNA is between the second and third HSV cDNAs. In some embodiments of the sixth aspect, the isolated nucleic acid molecule comprises a sequence selected from the group consisting of SEQ ID NOs: 73-74. In some embodiments of the sixth aspect, the isolated nucleic acid molecule comprises a sequence set forth in SEQ ID NO: 73. In some embodiments of the sixth aspect, the isolated nucleic acid molecule consists of a sequence set forth in SEQ ID NO: 73. In some embodiments of the sixth aspect, the isolated nucleic acid molecule comprises a sequence set forth in SEQ ID NO: 74. In some embodiments of the sixth aspect, the isolated nucleic acid molecule consists of a sequence set forth in SEQ ID NO: 74.

[0016] In a seventh aspect, the disclosure provides a vector for the rescue of a recombinant measles virus comprising the isolated nucleic acid molecule of any one of the above aspects and embodiments. In some embodiments of the seventh aspect, the vector comprises a CMV promoter. In some embodiments of the seventh aspect, the vector comprises the sequence set forth in SEQ ID NO: 81. In some embodiments of the seventh aspect, the vector consists of the sequence set forth in SEQ ID NO: 81. In some embodiments of the seventh aspect, the vector comprises a T7 promoter. In some embodiments of the seventh aspect, the vector comprises the sequence set forth in SEQ ID NO: 3.

[0017] In an eighth aspect, the disclosure provides a recombinant measles virus comprising in its genome a cDNA sequence comprising the nucleic acid molecule of any one of the above aspects and embodiments.

[0018] In a ninth aspect, the disclosure provides an immunogenic composition comprising (i) an effective amount of the recombinant measles virus of the eighth aspect, and (ii) a pharmaceutically acceptable carrier.

[0019] In a tenth aspect, the disclosure provides methods for treating or preventing a herpes simplex virus (HSV) infection in a subject in need thereof, comprising administering an effective amount of the immunogenic composition according to the ninth aspect to the subject.

[0020] In an eleventh aspect, the disclosure provides methods for inducing a protective immune response against herpes simplex virus (HSV) in a subject in need thereof, comprising administering an effective amount of the immunogenic composition of the ninth aspect to the subject.

[0021] In some embodiments of the tenth and eleventh aspects, the methods comprise a first administration of the immunogenic composition and a second administration of the immunogenic composition. In some embodiments, the protective immune response is a humoral immune response and/or a cellular immune response. In some embodiments, the second administration is performed from one month to two months after the first administration. In some embodiments, the subject is a human. In some embodiments of the tenth and eleventh aspects, the protective immune response against HSV prevents or reduces the severity of primary genital disease associated with HSV infection.

[0022] The disclosure provides uses of the recombinant measles virus of the eighth aspect or the immunogenic composition of the ninth aspect for preventing or treating an HSV infection in a subject in need thereof. The disclosure also provides for the use of the recombinant measles virus of the eighth aspect or the immunogenic composition of the ninth aspect for the manufacture of a medicament for the prevention or treatment of an HSV infection.

[0023] The disclosure also provides the recombinant measles virus of the eighth aspect or the immunogenic composition the ninth aspect, for use in preventing or treating an HSV infection in a subject in need thereof.

[0024] The disclosure also provides in vitro use of the recombinant measles virus of the eighth aspect or the immunogenic composition of the ninth aspect for expressing an HSV protein in eukaryotic cells.

[0025] In a twelfth aspect, the disclosure provides for an isolated peptide comprising the sequence set forth in SEQ ID NO: 58 (HSV-2 gBmut), SEQ ID NO: 100 (HSV-2 gBmutdel25), or SEQ ID NO: 64 (HSV-2 gBwtdel25), wherein SEQ ID NOs: 95 and 64 do not include residues 877-901 of SEQ ID NO: 55 (HSV-2 gB wild-type), or variants thereof, and wherein SEQ ID NOs: 58 and 95 comprise an alanine at position 665, an alanine at position 675, and an alanine at position 677.

[0026] In some embodiments of the twelfth aspect, the variant of SEQ ID NO: 58 has 95%, 96%, 97%, 98%, or 99% homology to the amino acid of SEQ ID NO: 58, the variant of SEQ ID NO: 100 has 95%, 96%, 97%, 98%, or 99% homology to the amino acid of SEQ ID NO: 100, or the variant of SEQ ID NO: 64 has 95%, 96%, 97%, 98%, or 99% homology to the amino acid of SEQ ID NO: 64. In some embodiments, the isolated polypeptide consists of SEQ ID NO: 58 (HSV-2 gBmut), SEQ ID NO: 100 (HSV-2 gBmutdel25), or SEQ ID NO: 64 (HSV-2gBwtdel25), wherein SEQ ID NOs: 95 and 64 do not include residues 877-901 of SEQ ID NO: 55 (HSV-2 gB wild-type).

[0027] In a thirteenth aspect, the disclosure provides an isolated nucleic acid molecule encoding the isolated peptide of any one of the isolated peptides of the twelfth aspect.

[0028] In a fourteenth aspect, the disclosure provides an immunogenic composition comprising (i) an effective amount of the isolated peptide of any one of the isolated peptide embodiments of the twelfth aspect, and (ii) a pharmaceutically acceptable carrier.

[0029] In a fifteenth aspect, the disclosure provides methods for treating or preventing a herpes simplex virus (HSV) infection in a subject in need thereof, comprising administering an effective amount of the immunogenic composition of the twelfth aspect.

[0030] In a sixteenth aspect, The disclosure provides methods for inducing a protective immune response against herpes simplex virus (HSV) in a subject in need thereof, comprising administering an effective amount of the immunogenic composition of the twelfth aspect to the subject.

[0031] In some embodiments of the fifteenth and sixteenth aspects, the methods comprise a first administration of the immunogenic composition and a second administration of the immunogenic composition. In some embodiments, the protective immune response is a humoral immune response and/or a cellular immune response. In some embodiments, the second administration is performed from one month to two months after the first administration. In some embodiments, the subject is a human. In some embodiments of the tenth and eleventh aspects, the protective immune response against HSV prevents or reduces the severity of primary genital disease associated with HSV infection.

[0032] The disclosure provides uses of the isolated peptides of any one of the isolated peptides of the twelfth aspect or the immunogenic composition of the fourteenth aspect for preventing or treating an HSV infection in a subject in need thereof.

[0033] The disclosure also provides the isolated peptides of any one of the embodiments of the twelfth aspect or the immunogenic composition of the fourteenth aspect, for use in preventing or treating an HSV infection in a subject in need thereof.

[0034] The disclosure also provides in vitro use of the isolated peptides of any one of the embodiments of the twelfth aspect or the immunogenic composition of the fourteenth aspect for expressing an HSV protein in eukaryotic cells.

[0035] The summary of the technology described above is non-limiting and other features and advantages of the technology will be apparent from the following detailed description, and from the claims.

### BRIEF DESCRIPTION OF THE DRAWINGS

[0036] FIG. 1 shows a schematic diagram of a recombinant measles vector genome. Additional transcriptional units (ATUs) are marked. ATU1 is positioned before the measles N gene; ATU2 is positioned between the measles P and M genes, and ATU3 is positioned between the measles H and L genes.

[0037] FIG. 2 shows line graphs comparing growth of MV expressing monovalent HSV-2 antigens (wild-type gB (gBwt), mutated gB (gBmut), wild-type gD (gD), or gC (F327A; gC) from the ATU2 or the ATU3 positions in MV. Virus release from cells and cell-associated virus were both measured (TCID50/mL).

[0038] FIG. 3A shows photographs of antigen expression from Vero cells infected by bivalent MV constructs B-08, B-09, and B-10. FIG. 3B shows photographs of antigen expression from Vero cells infected by trivalent MV constructs T-11 and T-15. FIG. 3C shows photographs of antigen expression from Vero cells infected by trivalent MV constructs T-12, T-13, T-14, and T-16.

[0039] FIG. 4A shows a graph of viral titer released from cells (TCID50/ml) across days post-infection for bivalent MV-HSV constructs as described in Example 4. FIG. 4B shows a graph of viral titer released from cells (TCID50/ml) across days post-infection for trivalent MV-HSV constructs as described in Example 4.

[0040] FIGS. 5A-5B show graphs of viral titer released from cells (FIG. 5A) and cell-associated virus (FIG. 5B) across days post-infection for trivalent MV-HSV constructs T-15 and T-18 in Example 5, specifically at late time points of infection. FIGS. 5C-5D show graphs of viral titer released from cells (FIG. 5C) and cell-associated virus (FIG. 5D) across days post-infection for trivalent MV-HSV constructs T-15 and T-18 in Example 5, specifically at early time points of infection.

[0041] FIG. 6 shows agarose gels of PCR-amplified HSV inserts from MV-HSV construct T-15 (gD_ATUa_gBwt_ATUb_gC) at passages 3, 4, 5, 6, and 7.

[0042] FIG. 7A shows gB antibody responses in cotton rats to various MV-HSV constructs and MV-Schwarz control virus at day 28, day 42, and day 49 after receiving two doses of a given construct. FIG. 7B shows gC antibody responses in cotton rats to various MV-HSV constructs and MV-Schwarz control virus at day 28, day 42, and day 49 after receiving two doses of a given construct. FIG. 7C shows gD antibody responses in cotton rats to various MV-HSV constructs and MV-Schwarz control virus at day 28, day 42, and day 49 after receiving two doses of a given construct. FIG. 7D shows serum neutralizing antibody (SNA) responses in cotton rats to various MV-HSV constructs and MV-Schwarz control virus at day 28, day 42, and day 49 after receiving two doses of a given construct.

[0043] FIG. 8A shows gB antibody responses in cotton rats to various MV-HSV constructs and MV-Schwarz control virus at day 28, day 42, and day 49 after receiving two doses of constructs MV-HSV constructs T-15 and T-16 with controls. FIG. 8B shows gC antibody responses in cotton rats to various MV-HSV constructs and MV-Schwarz control virus at day 28, day 42, and day 49 after receiving two doses of constructs MV-HSV constructs T-15 and T-16 with controls. FIG. 8C shows gD antibody responses in cotton rats to various MV-HSV constructs and MV-Schwarz control virus at day 28, day 42, and day 49 after receiving two doses of constructs MV-HSV constructs T-15 and T-16 with controls. FIG. 8D shows serum neutralizing antibody (SNA) responses in cotton rats to various MV-HSV constructs and MV-Schwarz control virus at day 28, day 42, and day 49 after receiving two doses of constructs MV-HSV constructs T-15 and T-16 with controls.

[0044] FIG. 9 shows a dot plot of vaginal viral load in cotton rats after treatment with MV-HSV constructs T-15 or T-16, gD protein/ML-A+alhydrogel, or MV-Schwarz, followed by viral challenge with HSV-2.

### DETAILED DESCRIPTION OF THE INVENTION

### Definitions and Abbreviations

[0045] As used throughout the specification and appended claims, the following abbreviations apply:
[0046] ATU additional transcriptional unit
[0047] bp base pairs
[0048] BSA bovine serum albumin
[0049] CDS coding sequence
[0050] CMV human cytomegalovirus immediate early enhancer and promoter
[0051] ELISA enzyme-linked immunosorbent assay
[0052] ER endoplasmic reticulum
[0053] GE gene end
[0054] GS gene start
[0055] HSV Herpes Simplex Virus
[0056] IM intra-muscular
[0057] MOI multiplicity of infection
[0058] MV measles virus
[0059] MV-HSV measles virus carrying one or more HSV proteins in its genome
[0060] nt nucleotide(s)
[0061] ORF open reading frame
[0062] PBS phosphate buffered saline
[0063] PFU plaque forming units
[0064] SNA serum neutralizing antibody(ies)
[0065] WT wild-type

[0066] Listed below are definitions of various terms used herein. These definitions apply to the terms as they are used throughout this specification and claims, unless otherwise limited in specific instances, either individually or as part of a larger group.

[0067] Unless defined otherwise, all technical and scientific terms used herein have the same meaning as commonly understood by one of ordinary skill in the art. Generally, the nomenclature used herein and the laboratory procedures in cell culture, molecular genetics, organic chemistry, and peptide chemistry are those well-known and commonly employed in the art.

[0068] As used herein, the term “including” as well as other forms, such as “include,”

[0069] “includes,” and “included,” is not limiting.

[0070] As used herein, the term “about” in quantitative terms refers to plus or minus 10% of the value it modifies (rounded up to the nearest whole number if the value is not sub-dividable, such as a number of molecules or nucleotides).

[0071] All ranges disclosed herein are inclusive of the recited endpoints and independently combinable (for example, the range of “from 50 mg to 500 mg” is inclusive of the endpoints, 50 mg and 500 mg, and all the intermediate values). The endpoints of the ranges and any values disclosed herein are not limited to the precise range or value; they are sufficiently imprecise to include values approximating these ranges and/or values.

[0072] As used herein, the term “comprising” may include the embodiments “consisting of” and “consisting essentially of.” The terms “comprise(s),” “include(s),” “having,” “has,” “may,” “contain(s),” and variants thereof, as used herein, are intended to be open-ended transitional phrases, terms, or words that require the presence of the named ingredients/steps and permit the presence of other ingredients/steps. However, such description should be construed as also describing compositions or processes as “consisting of” and “consisting essentially of” the enumerated components, which allows the presence of only the named components or compounds, along with any acceptable carriers or fluids, and excludes other components or compounds.

### Attenuated Measles Virus

[0073] Measles virus (MV) is a non-segmented single-stranded, negative-sense enveloped RNA virus of the genus Morbilivirus within the family of Paramyxoviridae. Measles virus was isolated in 1954 (Enders, J. F., and T. C. Peebles. 1954. Propagation in tissue cultures of cytopathogenic agents from patients with measles. Proc. Soc. Exp. Biol. Med. 86:277-286), and live attenuated measles strains were derived from this virus to provide vaccines. Measles vaccines from live attenuated measles virus have been administered to hundreds of millions of children since 1963 and are well-known to be safe and efficacious in preventing measles infection. It is produced on a large scale in many countries and is distributed at low cost.

[0074] The disclosure describes attenuated recombinant measles virus particles that stably express one or more protein antigens of HSV (e.g., gD, gB, gC, and/or UL19). The disclosure also describes nucleic acid constructs which comprise an isolated cDNA encoding a full-length, infectious, attenuated antigenomic (+) RNA strand of a measles virus (MV) and at least one HSV glycoprotein (e.g., gD, gB, gC and/or UL19), such that a rescued MV comprises the at least one HSV protein in its genome.

[0075] The non-segmented genome of measles virus (MV) has an anti-message polarity which results in a genomic RNA which is not translated in vivo or in vitro and is not infectious when purified. Transcription and replication of measles virus do not involve the nucleus of the infected cells but rather take place in the cytoplasm of infected cells. The genome of the measles virus comprises genes encoding six major structural proteins from the six genes (designated N, P, M, F, H and L) and an additional two non-structural proteins from the P gene (C and V). The gene order is the following: 3′, N, P (including C and V), M, F, H, and L (the L gene encoding for the large polymerase protein at the 5′ end (see schematic diagram of FIG. 1). The MV genome further comprises non-coding regions in the intergenic region M/F; this non-coding region contains approximately 1000 nucleotides of untranslated RNA. The MV genes respectively encode the proteins of the nucleocapsid of the virus, i.e., the nucleoprotein (N), the phosphoprotein (P), and the large protein (L) which assemble around the genome RNA to provide the nucleocapsid. The other genes encode the proteins of viral envelope including the hemagglutinin (H), the fusion (F) and the matrix (M) proteins.

[0076] In some embodiments, the MV used is an attenuated strain. As used herein, an “attenuated strain” of measles virus is a strain that is avirulent or less virulent than the parent strain in the same host, while maintaining immunogenicity and optionally adjuvanticity when administered to a host, i.e., preserving immunodominant T and B cell epitopes and possibly the adjuvanticity such as the induction of T cell costimulatory proteins or the cytokine IL-12.

[0077] An attenuated strain of a measles virus accordingly refers to a strain which has been serially passaged on selected cells and, possibly, adapted to other cells to produce seed strains suitable for the preparation of vaccine strains, harboring a stable genome which would not allow reversion to pathogenicity nor integration in host chromosomes. Particular strains of attenuated MV that can be used are the Schwarz strain, the Zagreb strain, the AIK-C strain and the Moraten strain. In specific embodiments, the attenuated strain of measles virus in any one of the embodiments or aspects herein is the Schwarz strain, the Zagreb strain, the AIK-C strain or the Moraten strain

[0078] In some embodiments of the invention, the vector for the rescue of a recombinant measles virus comprising the isolated nucleic acid molecule disclosed herein comprises a heterologous promoter sequence. Exemplary heterologous promoters include the CMV promoter sequence. In some embodiments, the vector is pBluescript KS (+) (GenBank X52331.1; SEQ ID NO: 1). In some embodiments, the vector is pBluescript II KS (+) (Agilent, Santa Clara, CA, United States, Cat. #212207, GenBank X52327.1; SEQ ID NO: 2). In some embodiments, the vector includes a T7 promoter sequence, a T7 terminator sequence, and a hammerhead ribozyme sequence. An exemplary sequence is that of plasmid pTM-MVSchw (SEQ ID NO: 3; see WO2004000876A1). The plasmid pTM-MVSchw is a Bluescript plasmid that comprises the polynucleotide coding for the full-length measles virus (+) RNA strand of the Schwarz strain placed under the control of the promoter of the T7 RNA polymerase.

[0079] In embodiments described herein, the MV-HSV cDNA includes HSV proteins inserted into an additional transcriptional unit (ATU). The term “additional transcriptional unit” or “ATU” in relation to the MV genome refers to an intergenic region of the MV genome having cis-acting 3′ and 5′ untranslated regions (UTRs) of the genes, which are composed of the non-coding sequences (NCS) and of conserved gene end (GE) and gene start (GS) signals necessary for the transcription of the immediately adjacent open reading frames. This “GE/GS stop-start signal” is comprised of a conserved GE sequence, a non-transcribed conserved trinucleotide sequence, and a conserved GS sequence (see Parks et al., J Virol. 2001 January;75 (2): 921-33). During transcription, each gene in a transcription unit of the MV genome is sequentially transcribed into mRNA by the viral RNA-dependent RNA polymerase that starts the transcription process at the GS sequence. At each gene junction, transcription is interrupted as a result of the disengagement of the RNA polymerase at the GE sequence. Re-initiation of transcription occurs at the subsequent GS sequence.

[0080] To enable the MV cDNA to act as a vector for the expression of one or more HSV heterologous genes, a multiple-cloning-site cassette having one or more HSV genes can be cloned into the intergenic region of the MV so as to maintain the MV non-coding sequences and the conserved gene end (GE) and gene start signals (GS) of the immediately adjacent open reading frames of the intergenic transcription unit in which it is inserted; see, e.g., the ATU region described for the EdB-tag vector in Radecke et al., 1997 Rev. Med. Virol. 7:49-63, and Wei et al., 2019 Biochem. Biophys. Res. Comm. 508:1221-1226. Following cloning, the resulting ATU contains an additional GE/GS stop-start signal suitable for the transcription of the one or more inserted heterologous HSV genes. When multiple heterologous HSV genes are inserted, each heterologous HSV gene may be separated by an “interstitial ATU,” which is an additional GE/GS stop-start signal that separates the heterologous HSV genes. In specific embodiments, the additional GE/GS stop-start signal is the same as that found in an MV intergenic region. In specific embodiments, the GE/GS stop-start signal is a variant of that found in an MV intergenic region.

[0081] It is important in all cases that the ATU shall comply with the broader “rule of six” to allow for the expression of the one or more heterologous genes.

[0082] In this disclosure, locations of ATUs along the MV genome are numbered. ATU position 1 (ATU1) is in the MV leader sequence before the N gene. ATU position 2 (ATU2) is in the intergenic region between the P and M genes. ATU position 3 (ATU3) is in the intergenic region between the H and L genes. Insertion of heterologous transcription units ATU2 and ATU3 can be accomplished as disclosed herein or as elsewhere described in the literature, for example, in Combredet et al., 2003 J. Virol. 11546-11554.

[0083] In some embodiments, an ATU cDNA comprises a GS sequence for an N gene and a GE sequence, such as at ATU1 in MV, or suitable GS and GE variants that are capable of starting and ending transcription, respectively, in the MV. For example, in specific embodiments, the ATU cDNA comprises a GE/GS sequence (GE/GS stop-start signal) comprising CTTCTAGTGCACTTAGGATTCAA (SEQ ID NO: 83), wherein the GE sequence is CTTCTAGTGCA (SEQ ID NO: 84), the conserved trinucleotide sequence is CTT (SEQ ID NO: 85), and the GS sequence is AGGATTCAA (SEQ ID NO: 86). In some embodiments, the ATU cDNA comprises the GE of an N gene and the GS of a P gene. In some embodiments, the ATU cDNA comprises GTTATAAAAAACTTAGGAACCAGGTCCACAC (ATU upstream motif; SEQ ID NO: 87), wherein the GE sequence is GTTATAAAAAA (GE of N gene; SEQ ID NO: 88), the conserved trinucleotide sequence is CTT (SEQ ID NO: 85), and the GS sequence is AGGAACCAGGTCCACAC (GS of P gene; SEQ ID NO: 89). In some embodiments, the ATU cDNA comprises the GE of a P gene and the GS of a M gene. In some embodiments, the ATU cDNA comprises ATTATAAAAAACTTAGGAGCAAAGTGATTGC (ATU downstream motif; SEQ ID NO: 90), wherein the GE sequence is ATTATAAAAAA (GE of P gene; SEQ ID NO: 91), the conserved trinucleotide sequence is GTT (SEQ ID NO: 85), and the GS sequence is AGGAGCAAAGTGATTGC (GS of M gene; SEQ ID NO: 92). In some embodiments, the ATU cDNA comprises a GE and GS sequence of the same gene combined with the conserved trinucleotide sequence. For example, in specific embodiments, the ATU cDNA comprises the GE and the GS of the P gene combined with a conserved trinucleotide sequence, i.e., ATTATAAAAAACTTAGGAACCAGGTCCACAC (ATUa; SEQ ID NO: 93). In some embodiments, the ATU cDNA comprises a hybrid GS sequence that combines portions of sequences from different MV intergenic regions. In some embodiments, the ATU cDNA comprises a hybrid GS sequence that is a combination of a GS sequence of an MV P gene and a GS sequence of an MV M gene, e.g., AGGAGCAAAGTCCACAC (SEQ ID NO: 94). In some embodiments, the ATU cDNA comprises a hybrid GS sequence combined with a GE from an N gene, e.g., GTTATAAAAAACTTAGGAGCAAAGTCCACAC (ATUb; SEQ ID NO: 100). In some embodiments, the hybrid GS sequence may be a consensus GS sequence, e.g., AGGATCCAAGAGCATAC (SEQ ID NO: 96). In some embodiments, the ATU cDNA comprises a hybrid GS sequence and a GE from an N gene, e.g., GTTATAAAAAACTTAGGATCCAAGAGCATAC (SEQ ID NO: 97).

[0084] ATU sequence that flanks the GE/GS sequence may be part or all of an intergenic region of an MV strain (e.g., the N-P, P-M, or H-L intergenic region of the Schwarz, Zagreb, AIK-C, Moraten, or Rubeovax MV strain) that is duplicated in a different intergenic region of the MV (see FIG. 1).

[0085] In some embodiments of the MV described herein, the heterologous HSV gene may be preceded by a Kozak sequence. The term “Kozak sequence” refers to a nucleic acid motif that acts as a protein translation initiation site for the heterologous gene or genes and includes the ATG initiation codon. In some embodiments, the Kozak sequence in a cDNA may be the sequence GCCGCCATG (SEQ ID NO: 98) or the sequence GCCACCATG (SEQ ID NO: 99).

[0086] Complementary DNA (cDNA) encoding MV-HSV as described herein complies with the “rule of six” which is required in order to express infectious viral particles. The term “rule of six” as used herein refers the fact that the total number of nucleotides present in the MV cDNA is a multiple of six. If the rule of six is not followed when adding heterologous genes, then replication of the MV genome RNA is inhibited (see Fields BN et al. (ed.). Fields Virology. 3^{rd} ed. Vol. 1. Raven Press; 1996 at p. 1197).

[0087] In some embodiments of the isolated nucleic acid molecules described herein, the HSV protein ORFs (the one or more HSV cDNAs encoding an HSV protein) are separated by a self-cleaving 2A peptide so that multiple separate peptides can be generated from a single ORF. The term “2A peptide”, “self-cleaving 2A peptide” or “2A self-cleaving peptide” refers to viral oligopeptides that are 18-22 amino acids in length and mediate cleavage of different polypeptides encoded by polycistronic mRNA during translation in eukaryotic cells. Coding sequences (CDS) for 2A peptides can be inserted between coding sequences for two polypeptides, and ribozyme skipping of the formation of glycyl-prolyl peptide bond at the C-terminus results in separation of the two polypeptides flanking the 2A peptide coding sequence (see Liu et al., Sci Rep. 2017 May 19;7(1):2193). A 2A peptide may be derived from various viruses, including but not limited to: T2A (thosea asigna virus 2A; SEQ ID NO: 4,GSGEGRGSLLTCGDVEENPGP); P2A (porcine teschovirus-1 2A; SEQ ID NO: 5,GSGATNFSLLKQAGDVEENPGP); E2A (equine rhinitis A virus; SEQ ID NO: 6,GSGQCTNYALLKLAGDVESNPGP); and foot-and-mouth disease virus (F2A; SEQ ID NO: 7,GSGVKQTLNFDLLKLAGDVESNPGP). In some embodiments, the GSG sequence at the N-terminal residues 1-3 can be removed, although this can decrease cleavage efficiency: T2A-SEQ ID NO: 8, EGRGSLLTCGDVEENPGP; P2A-SEQ ID NO: 9,

[0088] ATNFSLLKQAGDVEENPGP; E2A-SEQ ID NO: QCTNYALLKLAGDVESNPGP; F2A-SEQ ID NO: 10, VKQTLNFDLLKLAGDVESNPGP.

[0089] In some embodiments of the isolated nucleic acid molecules described herein, a furin cleavage sequence may be positioned between HSV antigen ORFs instead of a 2A peptide. In such embodiments, a peptide sequence is recognized by a furin enzyme in a cell and cleaved, allowing separation of polypeptides in the cell. Furin cleavage sequences are traditionally described by the consensus sequence RXRR (SEQ ID NO: 12) or RXKR (SEQ ID NO: 13), wherein X is any amino acid. In some embodiments, the furin-cleavage sequence may be SEQ ID NO: 14 (RGRR), SEQ ID NO: 15 (RARR), SEQ ID NO: 16 (RLRR), SEQ ID NO: 17 (RMRR), SEQ ID NO: 18 (RFRR), SEQ ID NO: 19 (RWRR), SEQ ID NO: 20 (RKRR), SEQ ID NO: 21(RQRR), SEQ ID NO: 22 (RERR), SEQ ID NO: 23 (RSRR), SEQ ID NO: 24 (RPRR), SEQ ID NO: 25 (RVRR), SEQ ID NO: 26 (RIRR), SEQ ID NO: 27 (RCRR), SEQ ID NO: 28 (RYRR), SEQ ID NO: 29 (RHRR), SEQ ID NO: 30 (RRRR), SEQ ID NO: 31 (RNRR), SEQ ID NO: 32(RDRR), SEQ ID NO: 33 (RTRR), SEQ ID NO: 34 (RGKR), SEQ ID NO: 35 (RAKR), SEQ ID NO: 36 (RLKR), SEQ ID NO: 37 (RMKR), SEQ ID NO: 38 (RFKR), SEQ ID NO: 39 (RWKR), SEQ ID NO: 40 (RKKR), SEQ ID NO: 41 (RQKR), SEQ ID NO: 42 (REKR), SEQ ID NO: 43(RSKR), SEQ ID NO: 44 (RPKR), SEQ ID NO: 45 (RVKR), SEQ ID NO: 46 (RIKR), SEQ ID NO: 47 (RCKR), SEQ ID NO: 48 (RYKR), SEQ ID NO: 49 (RHKR), SEQ ID NO: 50 (RRKR), SEQ ID NO: 51 (RNKR), SEQ ID NO: 52 (RDKR), or SEQ ID NO: 53 (RTKR).

[0090] In some embodiments of the isolated nucleic acid molecules described herein, a furin cleavage sequence is used in combination with a 2A peptide to ensure that no additional 2A peptide sequence remains after self-cleavage by the 2A peptide. The furin cleavage sequence is adjacent to the 2A peptide, between an antigen and a 2A peptide sequence (see Fang et al., Nat Biotechnol. 2005 May;23(5):584-90; and WO2015054639A1, each of which is incorporated herein by reference). In some embodiments, the GSG linker may be removed (see Chng et al., Mabs. 2015;7 (2): 403-12, incorporated by reference herein).

[0091] Various combinations of ATUs, GE/GS sequence, 2A peptides, and 2A peptides with furin cleavage sequences are contemplated for the isolated nucleic acid molecules described herein. In some embodiments of the isolated nucleic acid molecules described herein, a single HSV protein ORF encoding an HSV protein (e.g., HSV-2 gC, gBwt, gBmut, gBwtdel25, gD, or UL19, see SEQ ID NOs: 57, 55, 58, 64, 56, and 65) is flanked by an ATU upstream motif (e.g., SEQ ID NO: 87) and an ATU downstream motif (e.g., SEQ ID NO: 90). For example, cDNA encoding HSV-2 gC, gBwt, gBmut, gBwtdel25, or gD (see SEQ ID NOs: 57, 55, 58, 64, 56, and 65) may be positioned at ATU2 (e.g., gC, see SEQ ID NO: 59) or at ATU3 (e.g., gC, gBwt, gBmut, gD, or UL19, see SEQ ID NOs: 60-63, and 66).

[0092] In some embodiments, two HSV protein coding sequences (e.g., gC, gBwt, gBmut, gBwtdel25, gD, or UL19, see SEQ ID NOs: 57, 55, 58, 64, 56, and 65) flanked by an ATU upstream motif (e.g., SEQ ID NO: 87) and an ATU downstream motif (e.g., SEQ ID NO: 90) may be separated by an ATUa motif (SEQ ID NO: 93) or ATUb motif (SEQ ID NO: 95). In some embodiments, the two HSV protein coding sequences may be located at ATU2 or at ATU3 (e.g., SEQ ID NOs: 66, 68-70). In some embodiments, the two HSV protein coding sequences may be separated by a 2A peptide coding sequence (SEQ ID NOs: 4-11). For example, see SEQ ID NO: 67.

[0093] In some embodiments, three HSV protein coding sequences (e.g., gC, gBwt, gBmut, gBwtdel25, or gD, see SEQ ID NOs: 57, 55, 58, 64, 56, and 65) flanked by an ATU upstream motif (e.g., SEQ ID NO: 87) and an ATU downstream motif (e.g., SEQ ID NO: 90) may be separated by an ATUa motif (SEQ ID NO: 93), an ATUb motif (SEQ ID NO: 95), a 2A peptide motif (SEQ ID NOs: 4-11), a furin cleavage site (SEQ ID NOs: 12-53) and a 2A peptide motif (SEQ ID NOs: 4-11), and combinations thereof. Such coding sequences may be located at ATU2or at ATU3. For example, see SEQ ID NOs: 71-82.

### Nucleic Acids and Proteins

[0094] In some embodiments, the inventions disclosed herein refer to isolated cDNA encoding MV-HSV.

[0095] As used herein, the term “operably linked” refers to a functional relationship between two or more nucleic acid sequences. For example, DNA encoding a secretory leader (i.e., a signal peptide), is operably linked to DNA for a polypeptide if it is expressed as a pre-protein that participates in the secretion of the polypeptide; a promoter or enhancer is operably linked to a coding sequence if it affects the transcription of the sequence; or a ribosome binding site is operably linked to a coding sequence if it is positioned so as to facilitate translation. Generally, “operably linked” means that the DNA sequences being linked are contiguous and, in the example of a secretory leader, in reading phase. However, enhancers do not have to be contiguous. Linking is accomplished by ligation at convenient restriction sites. If such sites do not exist, the synthetic oligonucleotide adaptors or linkers are used in accordance with conventional practice.

[0096] As used herein, the term “ORF” or “open reading frame” refers to a coding sequence of a gene that begins with the start codon, continues with the amino acid codons, and ends at a termination codon. A “gene” includes an ORF and includes sequences upstream of the start codon and downstream of the stop codon that may be useful for transcribing the ORF.

[0097] As used herein, the term “complementary DNA” or “cDNA” refers to a deoxyribonucleic acid (DNA) molecule obtained by reverse transcription of a ribonucleic acid (RNA) molecule, such as an mRNA molecule. The term “cDNA” refers to the fact that originally said molecule is obtained by reverse transcription of the full length genomic (−) RNA strand of the genome of viral particles of the measles virus. This should not be viewed as a limitation for the methods used for its preparation. Purified nucleic acids, including DNA are thus encompassed within the term cDNA.

[0098] As used herein, the term “isolated” used in the context of polypeptides or polynucleotides refers to polypeptides or polynucleotides that are at least partially free of other biological molecules from the cells or cell cultures in which they are produced. Such biological molecules include other nucleic acids, proteins, lipids, carbohydrates, or other material such as cellular debris and growth medium. It may further be at least partially free of expression system components such as biological molecules from a host cell or of the growth medium thereof. Generally, the term “isolated” is not intended to refer to a complete absence of such biological molecules or to an absence of water, buffers, or salts or to components of a pharmaceutical formulation that includes the polypeptides or polynucleotides.

[0099] In some embodiments of the MV-HSV constructs described herein, conservative amino acid substitutions may be used for the sequence of the encoded HSV antigens. As used herein the term “conservative amino acid substitution” refers to the substitution of an amino acid that is normally present in the sequence with a different amino acid of similar size, charge, or polarity. Examples of conservative substitutions include the substitution of a non-polar (hydrophobic) residue such as isoleucine, valine and leucine for another non-polar residue. Likewise, examples of conservative substitutions include the substitution of one polar (hydrophilic) residue for another such as between arginine and lysine, between glutamine and asparagine, and between glycine and serine. Additionally, the substitution of a basic residue such as lysine, arginine or histidine for another, or the substitution of one acidic residue such as aspartic acid or glutamic acid for another acidic residue are additional examples of conservative substitutions. Examples of non-conservative substitutions include the substitution of a non-polar (hydrophobic) amino acid residue such as isoleucine, valine, leucine, alanine, methionine for a polar (hydrophilic) residue such as cysteine, glutamine, glutamic acid or lysine and/or a polar residue for a non-polar residue. Those of skill in this art recognize that, in general, single amino acid substitutions in non-essential regions of a polypeptide do not substantially alter biological activity (see, e.g., Watson et al. (1987) Molecular Biology of the Gene, The Benjamin/Cummings Pub. Co., p. 224 (4th Ed.)). In addition, substitutions of structurally or functionally similar amino acids are less likely to disrupt biological activity. Exemplary conservative substitutions are set forth in Table 1 below.

TABLE 1
Exemplary Conservative Amino Acid Substitutions

| Original residue | Conservative substitution |
|---|---|
| Ala (A) | Gly; Ser |
| Arg (R) | Lys; His |
| Asn (N) | Gln; His |
| Asp (D) | Glu; Asn |
| Cys (C) | Ser; Ala |
| Gln (Q) | Asn |
| Glu (E) | Asp; Gln |
| Gly (G) | Ala |
| His (H) | Asn; Gln |
| Ile (I) | Leu; Val |
| Leu (L) | Ile; Val |
| Lys (K) | Arg; His |
| Met (M) | Leu; Ile; Tyr |
| Phe (F) | Tyr; Met; Leu |
| Pro (P) | Ala |
| Ser (S) | Thr |
| Thr (T) | Ser |
| Trp (W) | Tyr; Phe |
| Tyr (Y) | Trp; Phe |
| Val (V) | Ile; Leu |

[0100] In some embodiments of the HSV antigens encoded and expressed by the measles virus vector of the invention, the HSV antigens may have up to 0, 1, 2, 3, 4, 5, 6, 7, 8, 9, 10, 11, 12, 13, 14, 15, 16, 17, 18, 19, 20, 21, 22, 23, 24, 25, 26, 27, 28, 29, 30 or more conservative amino acid substitutions. In some embodiments, the measles vector polypeptides may have up to 0, 1, 2, 3, 4, 5, 6, 7, 8, 9, 10, 11, 12, 13, 14, 15, 16, 17, 18, 19, 20, 21, 22, 23, 24, 25, 26, 27, 28, 29, 30 or more conservative amino acid substitutions.

[0101] Polypeptide or polynucleotide molecules of the present disclosure may share a certain degree of sequence similarity or identity with the reference molecules (e.g., reference polypeptides or reference polynucleotides), for example, with art-described molecules (e.g., engineered or designed molecules or wild-type molecules). The term “identity,” as known in the art, refers to the degree of sequence relatedness between two sequences of polynucleotide or polypeptide molecules as determined by the number of matches between strings of two or more amino acid residues or nucleic acid residues. Identity measures the percent of identical matches between the smaller of two or more sequences with gap alignments (if any) addressed by a particular mathematical model or computer program (e.g., “algorithms”). Identity of related peptides can be readily calculated by known methods.

[0102] The term “percent identity” or “% identity” as it applies to polypeptide or polynucleotide sequences is defined as the percentage of residues (amino acid residues or nucleic acid residues) in the candidate amino acid or nucleic acid sequence that are identical with the residues in the amino acid sequence or nucleic acid sequence of a second sequence after aligning the sequences and introducing gaps, if necessary, to achieve the maximum percent identity. Methods and computer programs for the alignment are well known in the art. Identity depends on a calculation of percent identity but may differ in value due to gaps and penalties introduced in the calculation. Generally, variants of a particular polynucleotide or polypeptide have at least 40%, 45%, 50%, 55%, 60%, 65%, 70%, 75%, 80%, 85%, 90%, 91%, 92%, 93%, 94%, 95%, 96%, 97%, 98%, 99% but less than 100% sequence identity to that particular reference polynucleotide or polypeptide as determined by sequence alignment programs and parameters described herein and known to those skilled in the art. Calculation of the percent identity of two polynucleic acid sequences, for example, can be performed by aligning the two sequences for optimal comparison purposes (e.g., gaps can be introduced in one or both of a first and a second nucleic acid sequences for optimal alignment and non-identical sequences can be disregarded for comparison purposes). The nucleotides at corresponding nucleotide positions are then compared. When a position in the first sequence is occupied by the same nucleotide as the corresponding position in the second sequence, then the molecules are identical at that position. The percent identity between the two sequences is a function of the number of identical positions shared by the sequences, accounting for the number of gaps and the length of each gap, which needs to be introduced for optimal alignment of the two sequences. The comparison of sequences and determination of percent identity between two sequences can be accomplished using a mathematical algorithm in an alignment tool (e.g. the Needleman-Wunsch algorithm in an online tool).

[0103] As used herein, the term “global alignment” refers to an alignment of residues between two amino acid or nucleic acid sequences along their entire length, introducing gaps as necessary if the two sequences do not have the same length, to achieve a maximum percent identity. A global alignment can be created using the global alignment tool “Needle” from the online European Molecular Biology Open Software Suite (EMBOSS) (see www.ebi.ac.uk/Tools/psa/emboss_needle/) or the global alignment tool “BLAST® »>Global Alignment” from the National Center for Biotechnology Information (NCBI) (see blast.ncbi.nlm.nih.gov/Blast.cgi?PROGRAM=blastn&PAGE_TYPE=BlastSearch&PROG DEF AULTS=on&BLAST_INIT=GlobalAln&BLAST_SPEC=GlobalAln&BLAST_PROGRAMS=bl astn). Both of these global alignment tools incorporate the Needleman-Wunsch algorithm (Needleman, S.B. & Wunsch, C.D. (1970) “A general method applicable to the search for similarities in the amino acid sequences of two proteins.” J. Mol. Biol. 48:443-453). In a preferred embodiment, a global alignment of nucleotide sequences using BLAST Global Alignment uses the following default parameters: match score=2; mismatch score =−3; Gap Cost Existence score =5; Gap Cost Extension Score =2. In a preferred embodiment, a global alignment of protein sequences using BLAST Global Alignment uses the following default parameters: Gap Cost Existence =11; Gap Cost Extension =1.

[0104] In some embodiments, codons encoding amino acid sequences may be substituted using wobble degenerate codons. As used herein, the term “wobble degenerate codon,” refers to a codon encoding a naturally occurring amino acid in either DNA or RNA. Wobble degenerate codons, when present in mRNA, are recognized by a natural tRNA anticodon through at least one non-Watson-Crick, or wobble base-pairing (e.g., A-C or G-U base-pairing). Watson-Crick base-pairing refers to either the G-C or A-U (RNA or DNA/RNA hybrid) or A-T (DNA) base-pairing. When used in the context of mRNA codon-tRNA anticodon base-pairing, Watson-Crick base-pairing means all codon-anticodon base-pairings are mediated through either G-C or A-U.

[0105] In some embodiments, the nucleic acids encoding the HSV proteins are codon optimized. Codon optimization methods are known in the art and may be used as provided herein. Codon optimization, in some embodiments, may be used to match codon frequencies in target and host organisms to ensure proper folding; bias GC content to increase mRNA stability or reduce secondary structures; minimize tandem repeat codons or base runs that may impair gene construction or expression; customize transcriptional and translational control regions; insert or remove protein trafficking sequences; remove/add post translation modification sites in encoded protein (e.g. glycosylation sites); add, remove or shuffle protein domains; insert or delete restriction sites; modify ribosome binding sites and mRNA degradation sites; adjust translational rates to allow the various domains of the protein to fold properly; or to reduce or eliminate problem secondary structures within the polynucleotide. Codon optimization tools, algorithms and services are known in the art-non-limiting examples include services from GeneArt (Life Technologies), DNA2.0 (Menlo Park CA), NovoPro Bioscience Inc. (Shanghai, China), and/or proprietary methods. In some embodiments, the sequence is optimized using optimization algorithms.

[0106] In some embodiments, a codon-optimized sequence shares less than 95% sequence identity, less than 90% sequence identity, less than 85% sequence identity, less than 80% sequence identity, or less than 75% sequence identity to a naturally-occurring or wild type sequence.

[0107] In some embodiments, a codon-optimized sequence shares between 65% and 85% (e.g., between about 67% and about 85%, or between about 67% and about 80%) sequence identity to a naturally-occurring sequence or a wild-type sequence. In some embodiments, a codon-optimized sequence shares between 65% and 75%, or about 80% sequence identity to a naturally-occurring sequence or wild-type sequence.

[0108] In some embodiments, nucleic acid sequence may be codon optimized for expression in cells from a particular animal species, such as a human (e.g., Homo sapiens) or other primate (e.g., Macaca mulatta or Macaca fascicularis). This optimization allows increasing the efficiency of chimeric infectious particles production in cells without impacting the expressed protein(s).

### HSV Proteins

[0109] The genome of Herpes Simplex Viruses (HSV-1 and HSV-2) contains about 85 open reading frames, such that HSV can generate at least 85 unique proteins, 12 of which are glycoproteins.

[0110] HSV glycoprotein C (gC) is a glycoprotein involved in the viral attachment to host cells. HSV gC plays a role in host immune evasion (also called viral immunoevasion) by inhibiting the host complement cascade activation. An MV-HSV immunogenic composition ideally will induce gC specific antibodies that block gC/C3b binding. HSV gC has 96-99% amino acid identity among HSV-2 strains and 64-69% amino acid identity among HSV-1 strains. An example of an HSV glycoprotein C (F327A) is set forth in SEQ ID NO: 54.

[0111] Glycoprotein B (gB) is a viral glycoprotein involved in the viral cell activity of HSV and is required for the fusion of the HSV envelope with the cellular membrane. HSV gB has 98-99% amino acid identity among HSV-2 strains and 88-90% amino acid identity among HSV-1 strains. An example of an HSV glycoprotein B is set forth in SEQ ID NO: 55.

[0112] Glycoprotein D (gD) is an envelope glycoprotein that binds to cell surface receptors and/or is involved in cell attachment via poliovirus receptor-related protein and/or herpes virus entry mediator, facilitating virus entry. HSV gD has 98-99% amino acid identity among HSV-2 strains and 82-88% identity among HSV-1 strains. An example of an HSV glycoprotein D is set forth in SEQ ID NO: 56.

[0113] UL19 (also called VP5) is the major capsid protein for HSV. UL19 self-assembles to form an icosahedral capsid. The capsid is surrounded by a layer of proteinaceous material designated the tegument which, in turn, is enclosed in an envelope of host cell-derived lipids containing virus-encoded glycoproteins.

[0114] In some embodiments, an antigenic polypeptide suitable as an HSV protein includes gene products, naturally occurring polypeptides, synthetic polypeptides, homologs, orthologs, paralogs, fragments and other equivalents, variants, and analogs of the foregoing. A polypeptide may be a single molecule or may be a multi-molecular complex such as a dimer, trimer or tetramer. Polypeptides may also comprise single chain polypeptides or multichain polypeptides, such as antibodies or insulin, and may be associated or linked to each other. Most commonly, disulfide linkages are found in multichain polypeptides. The term “polypeptide” may also apply to amino acid polymers in which at least one amino acid residue is an artificial chemical analogue of a corresponding naturally occurring amino acid.

### Methods of Treatment

[0115] Provided herein are compositions (e.g., pharmaceutical compositions), methods, kits and reagents for prevention and/or treatment of HSV viral infection in humans and other mammals. MV-HSV immunogenic compositions can be used as therapeutic or prophylactic agents. They may be used in medicine to prevent and/or treat infectious disease. In exemplary aspects, the MV-HSV immunogenic compositions of the present disclosure are used to provide prophylactic protection from HSV virus infection. Prophylactic protection from HSV virus can be achieved following administration of an MV-HSV immunogenic compositions of the present disclosure. Immunogenic compositions can be administered once, twice, three times, four times or more. It is also envisioned that immunogenic compositions can be administered to an infected individual to achieve a therapeutic response. Dosing may need to be adjusted accordingly.

[0116] In some embodiments, the HSV immunogenic compositions of the present disclosure can be used as a method of preventing an HSV virus infection in a subject, the method comprising administering to the subject at least one MV-HSV immunogenic compositions as provided herein. In some embodiments, the MV-HSV immunogenic compositions of the present disclosure can be used as a method of treating an HSV virus infection in a subject, the method comprising administering to said subject at least one MV-HSV immunogenic compositions as provided herein. In some embodiments, the MV-HSV immunogenic compositions of the present disclosure can be used as a method of reducing an incidence of HSV virus infection in a subject, the method comprising administering to said subject at least one MV-HSV immunogenic compositions as provided herein. In some embodiments, the MV-HSV immunogenic compositions of the present disclosure can be used as a method of inhibiting spread of HSV virus from a first subject infected with HSV virus to a second subject not infected with HSV virus, the method comprising administering to at least one of said first subject and said second subject at least one MV-HSV immunogenic compositions as provided herein.

[0117] A method of eliciting an immune response in a subject against an HSV virus is provided in aspects of the invention. The method involves administering to the subject an HSV immunogenic composition described herein, thereby inducing in the subject an immune response specific to HSV virus antigenic polypeptide or an immunogenic fragment thereof.

[0118] A prophylactically effective dose is a therapeutically effective dose that prevents infection with the virus at a clinically acceptable level. In some embodiments the therapeutically effective dose is a dose listed in a package insert for the vaccine.

### Therapeutic and Prophylactic Compositions

[0119] Provided herein are compositions (e.g., pharmaceutical compositions), methods, kits and reagents for prevention, treatment or diagnosis of HSV infection in humans and other mammals, for example. MV-HSV immunogenic compositions can be used as therapeutic or prophylactic agents. They may be used in medicine to prevent and/or treat infectious disease. In some embodiments, immunogenic compositions in accordance with the present disclosure may be used for prevention and/or treatment of HSV infection.

[0120] MV-HSV immunogenic compositions may be administered prophylactically or therapeutically as part of an active immunization scheme to healthy individuals or early in infection during the incubation phase or during active infection after onset of symptoms. In some embodiments, the amount of immunogenic compositions of the present disclosure provided to a cell, a tissue or a subject may be an amount effective for immune prophylaxis.

[0121] MV-HSV immunogenic composition may be administered in one or more sequential doses. MV-HSV immunogenic compositions may be administrated with other prophylactic or therapeutic compounds. As a non-limiting example, a prophylactic or therapeutic compound may be an adjuvant or a booster. As used herein, when referring to a prophylactic composition, such as a vaccine, the term “booster” refers to an extra administration of the same or different prophylactic (vaccine) composition. A booster (or booster vaccine) may be given after an earlier administration of the prophylactic composition. The time of administration between the initial administration of the prophylactic composition and the booster may be, but is not limited to, 1 minute, 2 minutes, 3 minutes, 4 minutes, 5 minutes, 6 minutes, 7 minutes, 8 minutes, 9 minutes, 10 minutes, 15 minutes, 20 minutes 35 minutes, 40 minutes, 45 minutes, 50 minutes, 55 minutes, 1 hour, 2 hours, 3 hours, 4 hours, 5 hours, 6 hours, 7 hours, 8 hours, 9 hours, 10 hours, 11 hours, 12 hours, 13 hours, 14 hours, 15 hours, 16 hours, 17 hours, 18 hours, 19 hours, 20 hours, 21 hours, 22 hours, 23 hours, 1 day, 36 hours, 2 days, 3 days, 4 days, 5 days, 6 days, 1 week, 10 days, 2 weeks, 3 weeks, 1 month, 2 months, 3 months, 4 months, 5 months, 6 months, 7 months, 8 months, 9 months, 10 months, 11 months, 1 year, 18 months, 2 years, 3 years, 4 years, 5 years, 6 years, 7 years, 8 years, 9 years, 10 years, 11 years, 12 years, 13 years, 14 years, 15 years, 16 years, 17 years, 18 years, 19 years, 20 years, 25 years, 30 years, 35 years, 40 years, 45 years, 50 years, 55 years, 60 years, 65 years, 70 years, 75 years, 80 years, 85 years, 90 years, 95 years or more than 99 years. In some embodiments, the time of administration between the initial administration of the prophylactic composition and the booster may be, but is not limited to, 1 week, 2 weeks, 3 weeks, 1 month, 2 months, 3 months, 6 months or 1 year.

[0122] In some embodiments, MV-HSV immunogenic compositions may be administered intramuscularly or intradermally. In some embodiments, MV-HSV immunogenic compositions are administered intramuscularly.

[0123] MV-HSV immunogenic compositions may be utilized in various settings depending on the prevalence of the infection or the degree or level of unmet medical need. Immunogenic compositions have superior properties in that they produce much larger antibody titers and produce responses early than commercially available anti-viral agents/compositions.

[0124] Provided herein are pharmaceutical compositions including MV-HSV immunogenic compositions optionally in combination with one or more pharmaceutically acceptable excipients.

[0125] MV-HSV immunogenic compositions may be formulated or administered in combination with one or more pharmaceutically acceptable excipients. In some embodiments, immunogenic compositions comprise at least one additional active substances, such as, for example, a therapeutically active substance, a prophylactically active substance, or a combination of both. Immunogenic compositions may be sterile, pyrogen-free or both sterile and pyrogen-free. General considerations in the formulation and/or manufacture of pharmaceutical agents, such as vaccine compositions, may be found, for example, in Remington: The Science and Practice of Pharmacy 21st ed., Lippincott Williams & Wilkins, 2005 (incorporated herein by reference in its entirety). In some embodiments, MV-HSV immunogenic compositions are administered to humans, human patients or subjects.

[0126] Formulations of the MV-HSV immunogenic compositions described herein may be prepared by any method known or hereafter developed in the art of pharmacology. In general, such preparatory methods include the step of bringing the active ingredient (e.g., polypeptide or polynucleotide) into association with an excipient and/or one or more other accessory ingredients, and then, if necessary and/or desirable, dividing, shaping and/or packaging the product into a desired single-or multi-dose unit.

[0127] Relative amounts of the active ingredient, the pharmaceutically acceptable excipient, and/or any additional ingredients in a pharmaceutical composition in accordance with the disclosure will vary, depending upon the identity, size, and/or condition of the subject treated and further depending upon the route by which the composition is to be administered. By way of example, the composition may comprise between 0.1% and 100%, e.g., between 0.5 and 50%, between 1-30%, between 5-80%, at least 80% (w/w) active ingredient.

### Modes of MV-HSV Immunogenic Composition Administration

[0128] MV-HSV immunogenic compositions may be administered by any route which results in a therapeutically or prophylactically effective outcome. These include, but are not limited, to intradermal, intramuscular, intranasal and/or subcutaneous administration. The present disclosure provides methods comprising administering immunogenic compositions to a subject in need thereof. The exact amount required will vary from subject to subject, depending on the species, age, and general condition of the subject, the severity of the disease, the particular composition, its mode of administration, its mode of activity, and the like. MV-HSV immunogenic compositions are typically formulated in dosage unit form for ease of administration and uniformity of dosage. It will be understood, however, that the total daily usage of immunogenic compositions may be decided by the attending physician within the scope of sound medical judgment. The specific therapeutically effective, prophylactically effective, or appropriate imaging dose level for any particular patient will depend upon a variety of factors including the disorder being treated and the severity of the disorder; the activity of the specific compound employed; the specific composition employed; the age, body weight, general health, sex and diet of the patient; the time of administration, route of administration, and rate of excretion of the specific compound employed; the duration of the treatment; drugs used in combination or coincidental with the specific compound employed; and like factors well known in the medical arts.

[0129] An MV-HSV immunogenic pharmaceutical composition described herein can be formulated into a dosage form described herein, such as an intranasal, intratracheal, or injectable form (e.g., intravenous, intraocular, intravitreal, intramuscular, intradermal, intracardiac, intraperitoneal, intranasal and subcutaneous form).

### MV-HSV Virus Immunogenic Formulations and Methods of Use

[0130] Some aspects of the present disclosure provide formulations of the MV-HSV immunogenic composition, wherein the immunogenic composition is formulated in an effective amount to produce an antigen-specific immune response in a subject (e.g., production of antibodies specific to an HSV antigenic polypeptide). “An effective amount” is a dose of an immunogenic composition effective to produce an antigen-specific immune response. Also provided herein are methods of inducing an antigen-specific immune response in a subject.

[0131] In some embodiments, the antigen-specific immune response is characterized by measuring an anti-HSV antigenic polypeptide antibody titer produced in a subject administered an HSV immunogenic composition as provided herein. An antibody titer is a measurement of the level or concentration of antibodies within a sample from a subject, for example, antibodies that are specific to a particular antigen (e.g., an HSV antigenic polypeptide) or epitope of an antigen. Antibody titer is typically expressed as the inverse of the greatest dilution that provides a positive result. Enzyme-linked immunosorbent assay (ELISA) is a common assay for determining antibody titers, for example.

[0132] In some embodiments, an antibody titer is used to assess whether a subject has had an infection or to determine whether immunizations are required. In some embodiments, an antibody titer is used to determine the strength of an autoimmune response, to determine whether a booster immunization is needed, to determine whether a previous immunogenic composition was effective, and to identify any recent or prior infections. In accordance with the present disclosure, an antibody titer may be used to determine the strength of an immune response induced in a subject by an MV-HSV immunogenic composition.

[0133] The inventions of the disclosure are not limited in their application to the details of construction and the arrangement of components set forth in the following description or illustrated in the drawings. The inventions are capable of other embodiments and of being practiced or of being carried out in various ways. Also, the phraseology and terminology used herein is for the purpose of description and should not be regarded as limiting. The use of “including,” “comprising,” or “having,” “containing,” “involving,” and variations thereof herein, is meant to encompass the items listed thereafter and equivalents thereof as well as additional items.

### EXAMPLES

[0134] The following examples are meant to be illustrative and should not be construed as further limiting. The contents of the figures and all references, patents, and published patent applications cited throughout this application are expressly incorporated herein by reference.

### Example 1: Monovalent Recombinant Measles Viruses Carrying gB, gC, and gD

[0135] Monovalent recombinant measles viruses carrying various sequences of single HSV-2 antigens were generated and evaluated in vitro. The single antigens were gC (F327A) (SEQ ID NO: 57) at ATU2 or ATU3 of MV-Schwarz (SEQ ID NO: 3), mutated gB (gBmut; SEQ ID NO: 58) carrying additional mutations to reduce its toxicity, gB wild-type (gBwt; SEQ ID NO: 55), and gD wild-type (SEQ ID NO: 56). Table 2 below lists the monovalent MV-HSV constructs and their ATU locations.

TABLE 2
Monovalent MV-HSV constructs

| Vector name; | | |
|---|---|---|
| SEQ ID NO | Insert | ATU location |
| M-01 (SEQ ID | gC_ATU2 | ATU2 |
| NO: 59) | | |
| M-02 (SEQ ID | gC_ATU3 | ATU3 |
| NO: 60) | | |
| M-03 (SEQ ID | gBmut_ATU3 | ATU3 |
| NO: 61) | | |
| M-04 (SEQ ID | gD_ATU3 | ATU3 |
| NO: 62) | | |
| M-05 (SEQ ID | gBwt_ATU3 | ATU3 |
| NO: 63) | | |

### Viral Release Assay

[0136] Vero cells were seeded in T25 flasks at a cell density of 3.3E+04 cells per cm2 in a culture medium (Dulbecco's Modified Eagle Medium, DMEM GlutaMAX®, supplemented with 10% FCS) volume of 5 ml. Upon infection, culture medium was replaced with virus production-serum free medium (VP-SFM), supplemented with 4 mM L-glutamine and target virus (i.e., virus expressing heterologous HSV antigen) was added at an multiplicity of infection (MOI) of 0.01. As a control, additional cell culture flasks were infected with MV-Schwarz at the same MOI. Cell culture flasks were incubated at 32°° C., 5% CO2. Supernatants were harvested at day 3, 4, 5, 6 and 7 post-infection, centrifuged for 10 min at 900×g and 4° C., aliquoted and stored below −60° C. Subsequently, 5 ml VP-SFM+4 mM L-glutamine were added to the flasks containing the infected cells and the flasks were subjected to two freeze/thaw cycles. The detached frozen cells were then harvested and centrifuged for 10 min at 900 x g and 4° C. Supernatants of the lysed cells were then collected, aliquoted and stored below −60° C. The titer of the virus released from the cells (supernatant) as well as that of the cell associated viruses (i.e., virion formation within the cells; supernatant of lysed cells) were then determined by a TCID50 assay.

[0137] As shown in FIG. 2, MV vector expressing HSV-2 gC from position ATU2 (squares) demonstrated reduced viral release and reduced infectious viral particle formation within the cells compared to its counter vector with the insert at position ATU3 (diamonds). In addition, insertion of the wild-type sequence of HSV-2 gB at position ATU2 seemed to be too toxic for the virus as no virus with gBwt at position ATU2 could be rescued. Consequently, only measles vectors expressing the heterologous HSV-2 payloads at ATU3 were selected for further analysis in vivo.

### Example 2: Generation of Multivalent MV-HSV

[0138] Multivalent vectors were generated using the HSV-2 glycoproteins of Example 1. Two or three HSV-2 antigens were combined and separated by a) interstitial transcriptional units (interstitial ATUs); b) self-cleaving 2A peptides; or c) a combination thereof. Various inserts were designed in silico.

[0139] To improve the immunogenicity of the gB protein, a modified gB protein was constructed carrying a deletion of the last 25 amino acids of the cytoplasmic region—gBwtdel25 (SEQ ID NO: 64). This deletion removed the endoplasmic reticulum (ER) retention signal to allow increased surface expression in infected cells and increase the immunogenic potential of the MV.

[0140] Besides the HSV-2 antigens gB, gC and gD, a T-cell antigen UL19 (SEQ ID NO: 65; HSV-2 major capsid protein) was also selected as an additional target antigen and was combined with gBwt, gBmut or gBwtdel25. For each protein, a codon-optimization tool (www.novoprolabs.com/tools/codon-optimization) was used to generate a DNA stretch that encodes the desired protein with optimized codon usage for Homo sapiens. Long protein frames encoded in other frames as well as MV-editing sequences were removed by changing the 3rd nucleotide of a codon. The codon-optimized sequence was then reviewed to confirm that the codon usage of the alternative codon was of similar frequency to the originally suggested codon using a Homo sapiens codon frequency table (www.researchgate.net/figure/Homo-sapiens-codon-usage_tbl1_322560620).

[0141] The nucleotide sequences were chemically synthesized and cloned into the ATU3 position of MV-Schwarz. Finally, all bivalent and trivalent measles vectors as highlighted in Table 3 below were successfully rescued and subjected to further characterization in vitro.

TABLE 3
Bivalent and trivalent MV-HSV constructs

| Vector name; | Bivalent or | | Insert | ATU |
|---|---|---|---|---|
| SEQ ID NO | trivalent | Insert | size | location |
| B-06 (SEQ ID | bivalent | gD_ATUa_gC | ~2.8 kb | ATU3 |
| NO: 66) | | | | |
| B-07 (SEQ ID | bivalent | gD_P2A_gC | ~2.8 kb | ATU3 |
| NO: 67) | | | | |
| B-08 (SEQ ID | bivalent | gBwt_ATUa_UL19 | ~4.6 kb | ATU3 |
| NO: 68) | | | | |
| B-09 (SEQ ID | bivalent | gBmut_ATUa_UL19 | ~4.6 kb | ATU3 |
| NO: 69) | | | | |
| B-10 (SEQ ID | bivalent | gBwtdel25_ATUa_{—} | ~4.5 kb | ATU3 |
| NO: 70) | | UL19 | | |
| T-11 (SEQ ID | trivalent | gD_ATUa_gBmut_{—} | ~5.5 kb | ATU3 |
| NO: 71) | | ATUb_gC | | |
| T-12 (SEQ ID | trivalent | gD_P2A_gBmut_{—} | ~5.5 kb | ATU3 |
| NO: 72) | | T2A_gC | | |
| T-13 (SEQ ID | trivalent | gD_ATUa_gBmut_{—} | ~5.5 kb | ATU3 |
| NO: 73) | | P2A_gC | | |
| T-14 (SEQ ID | trivalent | gD_ATUa_gBwt_{—} | ~5.5 kb | ATU3 |
| NO: 74) | | P2A_gC | | |
| T-15 (SEQ ID | trivalent | gD_ATUa_gBwt_{—} | ~5.6 kb | ATU3 |
| NO: 75) | | ATUb_gC | | |
| T-16 (SEQ ID | trivalent | gD_ATUa_{—} | ~5.5 kb | ATU3 |
| NO: 76) | | gBwtdel25_ATUb_{—} | | |
| | | gC | | |

### Example 3: Antigen Expression in Bivalent and Trivalent Constructs

[0142] The expression of the heterologous recombinant antigens encoded by the various viruses was analyzed by an immunofocus staining assay using an alkaline phosphatase detection system (BCIP/NBT-plus substrate for ELISpot (Mabtech, Nacka Strand, SE; Cat. No.: 3650-10). Briefly, Vero cells were infected with various viruses of passage 1. Cells were fixed three days post-infection, cell membranes were permeabilized, and the heterologous antigen expression was detected using specific mouse monoclonal antibodies against gD (proprietary), gB (proprietary), gC (proprietary), and UL19 (Anti-HSV-1/2 ICP5 Major Capsid Protein Antibody (3B6); Santa Cruz Biotechnology, Dallas, TX, USA, Cat. No. sc-56989). To test for expression of measles proteins, cells were also stained for the measles virus H protein. Spots on the cell layer expressing the respective antigen exhibit a dark-blue coloring.

[0143] FIG. 3A shows the antigen expression of bivalent constructs, while FIGS. 3B and 3C show the expression of trivalent MV constructs. All viruses expressed the desired antigens. The trivalent vector expressing gD, gC (F327A) and gBwt (T-15) (see FIG. 3C), expressed all three antigens successfully. In contrast to T-15, two other trivalent viruses that carry a combination of an ATU and a 2A self-cleaving peptide (T-13 and T-14) showed impaired expression (see FIG. 3C). Surprisingly, the gC antigen downstream of the 2A self-cleaving peptide expressed less strongly than gD or gB in these constructs, as evidenced by very faint staining compared with gC expressed in other constructs.

[0144] The trivalent MV vector T-15 was also subjected to fluorescent-based immunostaining to allow for measles and HSV protein specific double staining (staining not shown in Figures). Vero cells infected with T-15, were fixed, permeabilized, and blocked with phosphate buffered saline (PBS)/0.05% Tween 20/1% bovine serum albumin (BSA). After blocking, measles and HSV protein specific double staining was performed using mouse MAbs for HSV gD (anti-gD 5H4A4), HSV gB (anti-gB 1F8.2B5), HSV gC (anti-gC 8E9.H2) and MV NP (Rabbit anti measles NP Ab, OriGene, AP55070SU-N) diluted in blocking solution. Measles NP expression was detected using AlexaFluor® 594 goat anti-rabbit secondary antibody (Life Technologies A11012), and heterologous antigen expression was detected using Alexa Fluor® 488 AffiniPure Goat Anti-Mouse IgG (H+L) (Jackson Laboratories; 115-545-003) secondary antibody. Images were captured using the ImageXpress® Pico Automated Cell Imagine (Molecular Devices, San Jose, CA, USA).

[0145] Because the HSV specific antibodies are derived from mouse, no triple staining could be performed. All cells infected with T-15 showed staining for both measles NP protein and HSV antigens, indicating all syncytia expressed the measles NP protein as well as the respective HSV antigen. There were no unstained or single stained syncytia detectable.

### Example 4: Growth Kinetics of Bivalent and Trivalent Constructs

[0146] To assess the replication capacity of the various viruses, growth curve analysis of bivalent and trivalent MV expressing either two or three HSV-2 antigens was performed. Virus material of passage 1 was used for analysis. Briefly, Vero cells seeded in T-25 flasks were infected with a defined MOI of 0.01. As a control, additional cell culture flasks were infected with the parental MV-Schwarz at the same MOI. Supernatants were then collected at different time points and the titer of virus released from cells was determined by TCID50 assay. The results are shown in FIG. 4.

[0147] Most of the bivalent vectors exhibited a similar virus production as the parental Schwarz virus. Only the bivalent vector expressing a wild-type version of the gB protein was clearly impaired. Interestingly, two of the trivalent MV vectors in which the antigens were combined with two ATU sequences, T-011 and T-15, also showed a good virus release reaching high titers around days 6 or 7. Again, the virus with the gBwt protein (T-15) was more impaired than the virus with the mutant version indicating again the potential toxicity of the gB protein. Nevertheless, the T-15 vector was considered superior to T-011, as the monovalent MV vector expressing the mutated gB version exhibited a clearly reduced induction of antibodies compared to the vector expressing gB wild-type. These data indicate that the gB modifications may have affected the protein conformation. The replication of the third trivalent vector T-12 containing T2A peptides was clearly affected by the heterologous insert, showing a reduced virus production at all time points.

### Example 5: Trivalent Vector With Modified gB Protein

[0148] Another trivalent vector with a modified gB protein gBwtdel25 (T-18; MV-gD_ATU-gBwtdel25_ATU_gC) was generated and the growth behavior was compared to the trivalent MV vector T-15. Passage 2 material was used for analysis. Again, Vero cells in T25 flasks were infected with an MOI of 0.01 and supernatants as well as cell-associated viruses (supernatants from lysed cells) were analyzed at late (FIGS. 5A and 5B) as well as at early (FIGS. 5C and 5D) time points.

[0149] Interestingly, both viruses grew to high titers and were only slightly impaired in viral replication compared to the parental Schwarz strain. The delay in virus release of T-15 as seen in Example 4 above with Passage 1 material was clearly less pronounced. This outcome was confirmed in two independent experiments. Overall, the data suggested that both T-15 and T-18 were able to replicate well and grow to high titers and thus both were selected for efficacy studies in cotton rats.

### Example 6: Incorporation of HSV Antigens on Measles Virions

[0150] To assess whether measles virus can incorporate HSV antigens into their viral membrane, confocal microscopy was used to investigate the cell compartments in which the HSV glycoproteins of T-15 and T-16 localize.

[0151] Both viruses expressed the native forms of gD and gC but differed in the expression of gB; T-15 expressed the wild-type version of gB while T-16 expressed the 25 amino acid deletion variant of gB. Deletion of the last 25 aa of the gB cytoplasmic domain removes the ER retention signal and would potentially increase its surface expression in infected cells and enhance the antibody responses to the antigen in vivo. Deletion of the cytoplasmic domain changed the localization of the protein. Cells infected with T-16 gBwtdel25 showed more gBwtdel25 staining on the cell surface (data not shown). In addition, expression of the gD protein seemed to be slightly affected by the expression of gBwtdel25 (data not shown). Comparison of T-15 and T-16 staining revealed that gD of T-16 was more localized on the cell surface than within the intracellular compartments (data not shown). No difference was seen in the expression of glycoprotein gC which exhibited intracellular localization in both T-15 and T-16 (data not shown).

[0152] The concentrations of gB, gC and gD in the bulk drug substance were quantified by Simple Western, and the abundance of the HSV glycoprotein on measles virions were compared to those on HSV-2 virions, assuming all three antigens are associated with virions. As shown in Table 4 below, only low levels of HSV antigens were detected in T-15.

TABLE 4
Abundance of HSV-2 gB, gC, and gD in T-15 virions

| MV construct | gB/particle | gC/particle | gD/particle |
|---|---|---|---|
| or Control | % HSV-2 | % HSV-2 | % HSV-2 |
| T-15 | 8% | 2% | 8% |
| HSV-2 Control | 100% | 100% | 100% |

### Example 7: Genetic Stability of T-15 Construct During Passaging

[0153] The genetic stability of T-15 was tested in T-flasks. The virus was passaged five times. Infection of each passage was performed with a MOI of 0.01, and virus was propagated for 6 days at 32° C., before the supernatant was harvested.

[0154] Harvested supernatants of each passage were subjected to RNA extraction, subsequent cDNA synthesis amplification of the genomic insert using primers ATU3-PCR-1F1 (SEQ ID NO: 77) and ATU3-PCR-1R1 (SEQ ID NO: 78), and agarose gel electrophoresis to check for large-scale deletions in the T-15 HSV genomic insert. Passage 4 & 7 (p4 & p7) harvested supernatants were also subjected to Sanger sequencing of the insert.

[0155] Amplicons of the genomic insert are shown in FIG. 6. Gel electrophoresis revealed that a PCR product of the anticipated size was readily detectable over the course of the virus passages. In addition, Sanger sequencing of the insert at Passage 4 and 7 confirmed the integrity of the insert. All these data together show that MV construct T-15 is genetically stable. Table 5 below lists the gel lanes, samples, and respective expected band size.

TABLE 5
Sample and expected band sizes for FIG. 6

| Lane | Sample | Expected band size (bp) |
|---|---|---|
| 1 | DNA marker | — |
| 2 | Neg. Control | — |
| 3 | MV-Schwarz p2 | 503 |
| 4 | T-15 p3-p7 | 6197 |

### Example 8: Bivalent and Trivalent MV Immunogenicity in Cotton Rats

[0156] Mice and guinea pigs are well established models to test and screen HSV-2 vaccines preclinically. However, these animal models are not permissive for measles virus infection. Cotton rats were selected as the preclinical small animal model because they are semi-permissive for measles virus infection and can be infected with HSV-2 following vaginal challenge. Like guinea pigs, cotton rats can exhibit lesion formation after HSV infection and can experience spontaneous recurrent vaginal disease after recovering from initial infection. Therefore, cotton rats can serve as a model for testing vaccine efficacy to prevent reactivation and recurrent disease.

### Measuring Antibody Titers and Viral Load

[0157] Antibody titers were measured using ELISA methodologies. Maxisorp plates were coated with recombinantly expressed gB, gC, or gD, and blocked with 3% milk in PBS-T. 4-fold serial serum dilutions were prepared starting from a 1:50 dilution in blocking buffer and transferred to assay plates. Binding was detected using species-specific horseradish peroxidase (HRP)-conjugated secondary antibodies. Interpolated titers were calculated using data from the dilutions for which the signal was directly above and below a predetermined threshold. This threshold was selected to match titers measured in this assay with titers previously measured in an alternate assay format. Serum samples that did not generate a signal that crossed the threshold value were reported as a titer of 25.

[0158] Viral load in cotton rats following HSV-2 infection was evaluated using plaque assays. Vero cells were seeded in 24-well plates and grown overnight. These cells were washed with serum free media immediately prior to infection. Vaginal swabs were placed in PBS at collection and were stored at 4° C. prior to analysis. These solutions were vortexed for 5-10 seconds, serially diluted in serum free culture media, and then transferred to the washed Vero cells. Plates were incubated for 1 hour at 37° C. and rocked every 15 minutes. After incubation, inoculum was aspirated, cells were overlaid with 0.75% methylcellulose in culture media containing 1.6% FBS, and plates were incubated at 37° C. for 3 days. Cells were then fixed and stained with crystal violet-glutaric dialdehyde, washed with water, and dried. Plaques were counted manually.

### MV Vector Administration

[0159] Mono-, di-, or trivalent antigen measles virus vectors were administered IM to cotton rats in two doses 28 days apart at 1×10⁵ TCID50. MV vectors were administered in 3 separate immunogenicity studies (Study A, Study B, Study C in FIGS. 7A-C and FIGS. 8A-8C). MV vectors tested were:
[0160] M-05 (insert gBwt_ATU3; SEQ ID NO: 63)
[0161] M-03 (insert gBmut_ATU3; SEQ ID NO: 61)
[0162] M-21 (insert gBwtdel25_ATU3; SEQ ID NO: 101)
[0163] B-06 (insert gD_ATUa gC_ATU3; SEQ ID NO: 66) administered in combination with M-21 (insert gBwtdel25_ATU3; SEQ ID NO: 101)
[0164] B-06 (insert gD_ATUa_gC_ATU3; SEQ ID NO: 66) administered in combination with M-22 (insert gBmutdel25_ATU3; SEQ ID NO: 102)
[0165] M-02 (insert gCwt_ATU3; SEQ ID NO: 60)
[0166] B-06 (insert gD_ATUa_gC_ATU3; SEQ ID NO: 66)
[0167] B-07 (insert gD_P2A_gC_ATU3; SEQ ID NO: 67)
[0168] T-15 (insert gD_ATUa_gBwt_ATUb_gC_ATU3; SEQ ID NO: 75)
[0169] T-11 (insert gD_ATUa_gBmut_ATUb_gC_ATU3; SEQ ID NO: 71)
[0170] T-23 (insert gD_P2A_gBmut_T2A_gC_ATU3; SEQ ID NO: 103)

[0171] For each immunogenicity study, sera were collected at four weeks post dose one (Day 28), and at two (Day 42) and three (Day 49) weeks post dose two. The gB, gC and gD specific IgG antibody titers were determined by ELISA using purified recombinant proteins as capture antigens substrates. Serum antibodies capable of neutralizing HSV-2 in the presence of exogenous complement also were quantified at the same time points.

### Results

[0172] As shown in FIG. 7A, gB antibody responses were only observed in MVs expressing the gB antigen, with the highest levels of response observed in the MVs T-15 and T-11. Similarly, the gC antibody specific responses were only observed in MVs expressing the gC antigen; again the trivalent viruses produced the highest antibody titers (FIG. 7B). The virus-induced gD antibody responses were equivalent to the responses generated by the positive control MV consisting of gD protein (5 mcg) in monophosphoryl lipid A (MPL-A)+Alhydrogel adjuvant (FIG. 7C). Most MVs showed serum neutralizing antibody (SNA) titers that were higher than the titers observed for the positive control vaccine gD/MPL-A+Alhydrogel (FIG. 7D). Collectively, these results demonstrate that the trivalent MVs TM-15 and T-11 induce robust antibody responses.

### Example 9: Trivalent MV Efficacy in Cotton Rats

[0173] To quantify the efficacy of the trivalent MVs T-15 and T-16, cotton rats were immunized using the same schedule and concentration that was employed in the immunogenicity studies. Three weeks after the second dose of the virus, the cotton rats were vaginally challenged with a lethal dose of HSV-2 strain MS. Survival and disease incidence were monitored for 28 days post challenge. Vaginal swabs were collected at 2 and 4 days post-challenge to quantify protection against acute viral shedding.

### Methods

[0174] Cotton rats were observed daily for 28 days post genital HSV-2 challenge. Time to clinical signs was defined as the first day a lesion was observed. For each group, the date was averaged, and the mean and standard error of the means calculated. If no clinical signs were observed for the 28 days no data is reported. Incidence was defined as the percentage of cotton rats in each group that showed at least one clinical sign. Mean survival time is the average of the day that each cotton rat succumbed to the challenge for each group (±standard error of the means). If the cotton rats survived the full 28 days no mean survival time is reported. Survival was defined as the percentage of cotton rats that survived to the end of the study.

### Results

[0175] Both MV T-15 and T-16 produced high levels of gB, gC, and gD specific antibody response (FIG. 8A-8C) and high levels of SNA titers (FIG. 8D) that were equivalent or higher than the positive control virus. Most of the trivalent-and positive control-vaccinated cotton rats were protected from primary genital disease compared to the cotton rats vaccinated with the measles virus Schwarz strain negative control (Table 6 below). This protection from primary disease translated to a 100% survival rate in these cotton rats compared to the 0% survival rate in the negative control group.

TABLE 6
Clinical signs in cotton rats treat with T-15, T-16

| | Mean Time | | | | Mean Survival | | | |
|---|---|---|---|---|---|---|---|---|
| | to Clinical | | | Incidence | Time ± SE | | | Survival |
| Group | Signs ± SE (Days) | | | (%) | (Days) | | | (%) |
| MV-gD_ATUa_gBwt_ATUb_gC | — | ± | — | 0 | — | ± | — | 100 |
| (T-15) | | | | | | | | |
| MV-gD_ATUa_gBwtdel25_ATUb_gC | 9.0 | ± | — | 13 | — | ± | — | 100 |
| (T-16) | | | | | | | | |
| gD protein/MPL-A + alhydrogel | 23.0 | ± | — | 14 | — | ± | — | 100 |
| MV-Schwarz | 10.6 | ± | 2.1 | 100 | 12.4 | ± | 1.9 | 0 |

[0176] The vaginal swabs collected 2 days post-viral challenge were used to quantify viral shedding using a plaque assay. There was a 3-log reduction in viral titers for the trivalent and positive control vaccinated cotton rats compared to the negative control virus (See FIG. 9). Additionally, over half of the cotton rats in these groups showed undetectable levels of viral shedding. The effect of treatment was maintained at 4 days although the viral titers to the control virus were reduced by day 4 (FIG. 9). These immunogenicity and efficacy results indicate that both trivalent MV-HSV candidates provided protection against genital HSV-2 challenge that were as good as or better than the positive control virus.

Lengthy table referenced here
US20250312441A1-20251009-T00001
Please refer to the end of the specification for access instructions.

[0177] The disclosed subject matter is not to be limited in scope by the specific embodiments and examples described herein. Indeed, various modifications of the disclosure in addition to those described will become apparent to those skilled in the art from the foregoing description and accompanying figures. Such modifications are intended to fall within the scope of the appended claims.

[0178] All references (e.g., publications or patents or patent applications) cited herein are incorporated herein by reference in their entirety and for all purposes to the same extent as if each individual reference (e.g., publication or patent or patent application) was specifically and individually indicated to be incorporated by reference in its entirety for all purposes. Other embodiments are within the following claims.

LENGTHY TABLES
The patent application contains a lengthy table section. A copy of the table is available in electronic form from the USPTO web site (https://seqdata.uspto.gov/?pageRequest=docDetail&DocID=US20250312441A1). An electronic copy of the table will also be available from the USPTO upon request and payment of the fee set forth in 37 CFR 1.19(b)(3).

1. An isolated nucleic acid molecule comprising:
a) a cDNA encoding a full length, antigenomic (+) RNA strand of an attenuated strain of measles virus (MV-cDNA);
b) one or more cDNAs encoding an herpes simplex virus (HSV) protein (HSV cDNA) selected from the group consisting of: gC, gD, gB, UL19, and variants thereof;
c) an upstream additional transcriptional unit (ATU) cDNA operably linked to the HSV cDNA that is 5′ of the HSV cDNA (upstream ATU cDNA); and
d) a downstream ATU cDNA operably linked to the HSV cDNA that is 3′ of the HSV cDNA (downstream ATU cDNA);
wherein the upstream ATU cDNA, the HSV protein cDNA, and the downstream ATU cDNA are between P and M genes of the MV-cDNA at ATU2 or between H and L genes of the MV-cDNA at ATU3.

2. The isolated nucleic acid molecule of claim 1, wherein each of the one or more HSV cDNAs encodes an HSV protein sequence independently selected from the group consisting of: SEQ ID NO: 54 (HSV-2 gC, wild-type); SEQ ID NO: 57 (HSV-2 gC F327A);
SEQ ID NO: 55 (HSV-2 gB, wild-type); SEQ ID NO: 58 (HSV-2 gBmut); SEQ ID NO: 58.1 (HSV-2 gBmutdel25); SEQ ID NO: 64 (HSV-2 gBwtdel25); SEQ ID NO: 56 (HSV-2 gD, wild-type); and SEQ ID NO: 65 (HSV-2 UL19).

3. The isolated nucleic acid of claim 1, wherein the upstream ATU cDNA, the HSV cDNA, and the downstream ATU cDNA is at ATU2 or ATU3 in the MV-cDNA.

4. (canceled)

5. The isolated nucleic acid molecule of claim 1, wherein the upstream ATU cDNA sequence is set forth in SEQ ID NO: 87 or 90.

6. (canceled)

7. The isolated nucleic acid molecule of claim 1, comprising a sequence selected from the group consisting of SEQ ID NOs: 59-63 and 96-97.

8. An isolated nucleic acid molecule comprising:
a) a cDNA encoding a full length, antigenomic (+) RNA strand of an attenuated strain of measles virus (MV-cDNA);
b) a first cDNA encoding an herpes simplex virus (HSV) protein selected from the group consisting of: gC, D, gB, UL19, and variants thereof (first HSV cDNA);
c) a second HSV cDNA encoding an HSV protein selected from the group consisting of: gC, gD, gB, UL19, and variants thereof (second HSV cDNA), wherein the first and second HSV cDNAs do not have the same sequence;
d) an upstream additional transcriptional unit (ATU) cDNA that is 5′ of the first HSV cDNA (upstream ATU cDNA);
e) a downstream ATU cDNA that is 3′ of the second HSV cDNA (downstream ATU cDNA); and
f) an interstitial ATU cDNA between the first and second HSV cDNAs (interstitial ATU cDNA);
wherein the upstream ATU cDNA, the first and second HSV cDNAs, the interstitial ATU cDNA and the downstream ATU cDNA are operably linked; and
wherein the upstream ATU cDNA, the first and second HSV cDNAs, the interstitial ATU, and the downstream ATU cDNA are between P and M genes of the MV-cDNA at ATU2 or between H and L genes of the MV-cDNA at ATU3.

9. The isolated nucleic acid molecule of claim 8, wherein the first and second HSV cDNAs each encode an HSV protein sequence independently selected from the group consisting of SEQ ID NO: 54 (HSV-2 gC, wild-type); SEQ ID NO: 57 (HSV-2 gC F327A); SEQ ID NO: 55 (HSV-2 gB, wild-type); SEQ ID NO: 58 (HSV-2 gBmut); SEQ ID NO: 58.1 (HSV-2 gBmutdel25); SEQ ID NO: 64 (HSV-2 gBwtdel25); SEQ ID NO: 56 (HSV-2 gD, wild-type);
and SEQ ID NO: 65 (HSV-2 UL19).

10. The isolated nucleic acid of claim 8, wherein the upstream ATU cDNA, the first and second HSV cDNAs, and the downstream ATU cDNA are at ATU2 or ATI3 in the MV-cDNA.

11. (canceled)

12. The isolated nucleic acid molecule of claim 8, wherein the upstream ATU cDNA sequence is set forth in SEQ ID NO: 87 or 90.

13. (canceled)

14. The isolated nucleic acid molecule of claim 8, wherein the interstitial ATU cDNA sequence is selected from the group consisting of SEQ ID NOs: 83, 87, 90, and 92.

15. The isolated nucleic acid molecule of claim 8, comprising a sequence selected from the group consisting of SEQ ID NOs: 66, 68, 69, and 70.

16. An isolated nucleic acid molecule comprising:
a) a cDNA encoding a full length, antigenomic (+) RNA strand of an attenuated strain of measles virus (MV-cDNA);
b) a first cDNA encoding an herpes simplex virus (HSV) protein (HSV cDNA) selected from the group consisting of: gC, gD, gB, UL19, and variants thereof (first HSV cDNA);
c) a second HSV cDNA encoding an HSV protein selected from the group consisting of: gC, gD, gB, UL19, and variants thereof (second HSV cDNA), wherein the first and second HSV cDNAs do not have the same sequence;
d) an upstream additional transcriptional unit (ATU) cDNA that is 5′ of the first HSV cDNA (upstream ATU cDNA);
e) a downstream ATU cDNA that is 3′ of the second HSV cDNA (downstream ATU cDNA); and
f) a furin cleavage site cDNA and 2A peptide cDNA between the first and second HSV protein cDNAs (Fur-2A cDNA);
wherein the upstream ATU cDNA, the first and second HSV cDNAs, the Fur-2A cDNA, and the downstream ATU cDNA are operably linked; and
wherein the upstream ATU cDNA, the first and second HSV cDNAs, the Fur-2A cDNA, and the downstream ATU cDNA are between P and M genes of the MV-cDNA at ATU2 or between H and L genes of the MV-cDNA at ATU3.

17. The isolated nucleic acid molecule of claim 16, wherein the first and second HSV cDNAs each encode an HSV protein sequence independently selected from the group consisting of: SEQ ID NO: 54 (HSV-2 gC, wild-type); SEQ ID NO: 57 (HSV-2 gC F327A); SEQ ID NO: 55 (HSV-2 gB, wild-type); SEQ ID NO: 58 (HSV-2 gBmut); SEQ ID NO:

58. 1 (HSV-2 gBmutdel25); SEQ ID NO: 64 (HSV-2 gBwtdel25); SEQ ID NO: 56 (HSV-2 gD, wild-type); and SEQ ID NO: 65 (HSV-2 UL19).

18. The isolated nucleic acid of claim 16, wherein the upstream ATU cDNA, the first and second HSV cDNAs, the Fur-2A cDNA, and the downstream ATU cDNA are at ATU2 or ATU3 in the MV-cDNA.

19. (canceled)

20. The isolated nucleic acid molecule of claim 16, wherein the upstream ATU cDNA sequence is set forth in SEQ ID NO: 87 or 90.

21. The isolated nucleic acid molecule of claim 16, wherein the downstream ATU cDNA sequence is set forth in SEQ ID NO: 90.

22. The isolated nucleic acid molecule of claim 16, wherein the furin cDNA of the Fur-2A cDNA encodes a protein sequence selected from the group consisting of SEQ ID NOs: 14-53, and wherein the 2A peptide cDNA of the Fur-2A cDNA encodes a protein sequence selected from the group consisting of SEQ ID NOs: 4-11.

23-49. (canceled)

50. A vector for the rescue of a recombinant measles virus, comprising the isolated nucleic acid molecule of claim 1.

51-54. (canceled)

55. A recombinant measles virus comprising in its genome a cDNA sequence comprising the nucleic acid molecule of claim 1.

56. An immunogenic composition comprising (i) an effective amount of the recombinant measles virus of claim 55, and (ii) a pharmaceutically acceptable carrier.

57. A method for treating or preventing a herpes simplex virus (HSV) infection in a subject in need thereof, comprising administering an effective amount of the immunogenic composition according to claim 56 to the subject.

58. A method for inducing a protective immune response against herpes simplex virus (HSV) in a subject in need thereof, comprising administering an effective amount of the immunogenic composition of claim 56 to the subject.

59-65. (canceled)

66. An isolated peptide comprising the sequence set forth in SEQ ID NO: 58 (HSV-2 gBmut), SEQ ID NO: 58.1 (HSV-2 gBmutdel25), or SEQ ID NO: 64 (HSV-2 gBwtdel25),
wherein SEQ ID NOs: 58.1 and 64 do not include residues 877-901 of SEQ ID NO: 55 (HSV-2 gB wild-type), or variants thereof, and
wherein SEQ ID NOs: 58 and 58.1 comprise an alanine at position 665, an alanine at position 675, and an alanine at position 677.

67-68. (canceled)

69. An isolated nucleic acid molecule encoding the isolated peptide of claim 66.

70. An immunogenic composition comprising (i) an effective amount of the isolated peptide of claim 66, and (ii) a pharmaceutically acceptable carrier.

71. A method for treating or preventing a herpes simplex virus (HSV) infection in a subject in need thereof, comprising administering an effective amount of the immunogenic composition according to claim 70 to the subject.

72. A method for inducing a protective immune response against herpes simplex virus (HSV) in a subject in need thereof, comprising administering an effective amount of the immunogenic composition of claim 70 to the subject.

73-79. (canceled)

The application's sequence listing, which the Patent Office published only in electronic form, follows.

SEQUENCE LISTING (103 sequences)

SEQ ID NO: 1 - DNA, 2958 bp, synthetic construct
  source 1..2958: mol_type = other DNA
cacctaaattgtaagcgttaatattttgttaaaattcgcgttaaatttttgttaaatcagctcattttttaaccaataggccgaaatcggcaaaatcccttataaatcaaaagaatagaccgagatagggttgagtgttgttccagtttggaacaagagtccactattaaagaacgtggactccaacgtcaaagggcgaaaaaccgtctatcagggcgatggcccactacgtgaaccatcaccctaatcaagttttttggggtcgaggtgccgtaaagcactaaatcggaaccctaaagggagcccccgatttagagcttgacggggaaagccggcgaacgtggcgagaaaggaagggaagaaagcgaaaggagcgggcgctagggcgctggcaagtgtagcggtcacgctgcgcgtaaccaccacacccgccgcgcttaatgcgccgctacagggcgcgtcccattcgccattcaggctgcgcaactgttgggaagggcgatcggtgcgggcctcttcgctattacgccagctggcgaaagggggatgtgctgcaaggcgattaagttgggtaacgccagggttttcccagtcacgacgttgtaaaacgacggccagtgaattgtaatacgactcactatagggcgaattggagctccaccgcggtggcggccgctctagaactagtggatcccccgggctgcaggaattcgatatcaagcttatcgataccgtcgacctcgagggggggcccggtacccagcttttgttccctttagtgagggttaatttcgagcttggcgtaatcatggtcatagctgtttcctgtgtgaaattgttatccgctcacaattccacacaacatacgagccggaagcataaagtgtaaagcctggggtgcctaatgagtgagctaactcacattaattgcgttgcgctcactgcccgctttccagtcgggaaacctgtcgtgccagctgcattaatgaatcggccaacgcgcggggagaggcggtttgcgtattgggcgctcttccgcttcctcgctcactgactcgctgcgctcggtcgttcggctgcggcgagcggtatcagctcactcaaaggcggtaatacggttatccacagaatcaggggataacgcaggaaagaacatgtgagcaaaaggccagcaaaaggccaggaaccgtaaaaaggccgcgttgctggcgtttttccataggctccgcccccctgacgagcatcacaaaaatcgacgctcaagtcagaggtggcgaaacccgacaggactataaagataccaggcgtttccccctggaagctccctcgtgcgctctcctgttccgaccctgccgcttaccggatacctgtccgcctttctcccttcgggaagcgtggcgctttctcatagctcacgctgtaggtatctcagttcggtgtaggtcgttcgctccaagctgggctgtgtgcacgaaccccccgttcagcccgaccgctgcgccttatccggtaactatcgtcttgagtccaacccggtaagacacgacttatcgccactggcagcagccactggtaacaggattagcagagcgaggtatgtaggcggtgctacagagttcttgaagtggtggcctaactacggctacactagaaggacagtatttggtatctgcgctctgctgaagccagttaccttcggaaaaagagttggtagctcttgatccggcaaacaaaccaccgctggtagcggtggtttttttgtttgcaagcagcagattacgcgcagaaaaaaaggatctcaagaagatcctttgatcttttctacggggtctgacgctcagtggaacgaaaactcacgttaagggattttggtcatgagattatcaaaaaggatcttcacctagatccttttaaattaaaaatgaagttttaaatcaatctaaagtatatatgagtaaacttggtctgacagttaccaatgcttaatcagtgaggcacctatctcagcgatctgtctatttcgttcatccatagttgcctgactccccgtcgtgtagataactacgatacgggagggcttaccatctggccccagtgctgcaatgataccgcgagacccacgctcaccggctccagatttatcagcaataaaccagccagccggaagggccgagcgcagaagtggtcctgcaactttatccgcctccatccagtctattaattgttgccgggaagctagagtaagtagttcgccagttaatagtttgcgcaacgttgttgccattgctacaggcatcgtggtgtcacgctcgtcgtttggtatggcttcattcagctccggttcccaacgatcaaggcgagttacatgatcccccatgttgtgcaaaaaagcggttagctccttcggtcctccgatcgttgtcagaagtaagttggccgcagtgttatcactcatggttatggcagcactgcataattctcttactgtcatgccatccgtaagatgcttttctgtgactggtgagtactcaaccaagtcattctgagaatagtgtatgcggcgaccgagttgctcttgcccggcgtcaatacgggataataccgcgccacatagcagaactttaaaagtgctcatcattggaaaacgttcttcggggcgaaaactctcaaggatcttaccgctgttgagatccagttcgatgtaacccactcgtgcacccaactgatcttcagcatcttttactttcaccagcgtttctgggtgagcaaaaacaggaaggcaaaatgccgcaaaaaagggaataagggcgacacggaaatgttgaatactcatactcttcctttttcaatattattgaagcatttatcagggttattgtctcatgagcggatacatatttgaatgtatttagaaaaataaacaaataggggttccgcgcacatttccccgaaaagtgc

SEQ ID NO: 2 - DNA, 2961 bp, synthetic construct
  source 1..2961: mol_type = other DNA
ctaaattgtaagcgttaatattttgttaaaattcgcgttaaatttttgttaaatcagctcattttttaaccaataggccgaaatcggcaaaatcccttataaatcaaaagaatagaccgagatagggttgagtgttgttccagtttggaacaagagtccactattaaagaacgtggactccaacgtcaaagggcgaaaaaccgtctatcagggcgatggcccactacgtgaaccatcaccctaatcaagttttttggggtcgaggtgccgtaaagcactaaatcggaaccctaaagggagcccccgatttagagcttgacggggaaagccggcgaacgtggcgagaaaggaagggaagaaagcgaaaggagcgggcgctagggcgctggcaagtgtagcggtcacgctgcgcgtaaccaccacacccgccgcgcttaatgcgccgctacagggcgcgtcccattcgccattcaggctgcgcaactgttgggaagggcgatcggtgcgggcctcttcgctattacgccagctggcgaaagggggatgtgctgcaaggcgattaagttgggtaacgccagggttttcccagtcacgacgttgtaaaacgacggccagtgagcgcgcgtaatacgactcactatagggcgaattggagctccaccgcggtggcggccgctctagaactagtggatcccccgggctgcaggaattcgatatcaagcttatcgataccgtcgacctcgagggggggcccggtacccagcttttgttccctttagtgagggttaattgcgcgcttggcgtaatcatggtcatagctgtttcctgtgtgaaattgttatccgctcacaattccacacaacatacgagccggaagcataaagtgtaaagcctggggtgcctaatgagtgagctaactcacattaattgcgttgcgctcactgcccgctttccagtcgggaaacctgtcgtgccagctgcattaatgaatcggccaacgcgcggggagaggcggtttgcgtattgggcgctcttccgcttcctcgctcactgactcgctgcgctcggtcgttcggctgcggcgagcggtatcagctcactcaaaggcggtaatacggttatccacagaatcaggggataacgcaggaaagaacatgtgagcaaaaggccagcaaaaggccaggaaccgtaaaaaggccgcgttgctggcgtttttccataggctccgcccccctgacgagcatcacaaaaatcgacgctcaagtcagaggtggcgaaacccgacaggactataaagataccaggcgtttccccctggaagctccctcgtgcgctctcctgttccgaccctgccgcttaccggatacctgtccgcctttctcccttcgggaagcgtggcgctttctcatagctcacgctgtaggtatctcagttcggtgtaggtcgttcgctccaagctgggctgtgtgcacgaaccccccgttcagcccgaccgctgcgccttatccggtaactatcgtcttgagtccaacccggtaagacacgacttatcgccactggcagcagccactggtaacaggattagcagagcgaggtatgtaggcggtgctacagagttcttgaagtggtggcctaactacggctacactagaaggacagtatttggtatctgcgctctgctgaagccagttaccttcggaaaaagagttggtagctcttgatccggcaaacaaaccaccgctggtagcggtggtttttttgtttgcaagcagcagattacgcgcagaaaaaaaggatctcaagaagatcctttgatcttttctacggggtctgacgctcagtggaacgaaaactcacgttaagggattttggtcatgagattatcaaaaaggatcttcacctagatccttttaaattaaaaatgaagttttaaatcaatctaaagtatatatgagtaaacttggtctgacagttaccaatgcttaatcagtgaggcacctatctcagcgatctgtctatttcgttcatccatagttgcctgactccccgtcgtgtagataactacgatacgggagggcttaccatctggccccagtgctgcaatgataccgcgagacccacgctcaccggctccagatttatcagcaataaaccagccagccggaagggccgagcgcagaagtggtcctgcaactttatccgcctccatccagtctattaattgttgccgggaagctagagtaagtagttcgccagttaatagtttgcgcaacgttgttgccattgctacaggcatcgtggtgtcacgctcgtcgtttggtatggcttcattcagctccggttcccaacgatcaaggcgagttacatgatcccccatgttgtgcaaaaaagcggttagctccttcggtcctccgatcgttgtcagaagtaagttggccgcagtgttatcactcatggttatggcagcactgcataattctcttactgtcatgccatccgtaagatgcttttctgtgactggtgagtactcaaccaagtcattctgagaatagtgtatgcggcgaccgagttgctcttgcccggcgtcaatacgggataataccgcgccacatagcagaactttaaaagtgctcatcattggaaaacgttcttcggggcgaaaactctcaaggatcttaccgctgttgagatccagttcgatgtaacccactcgtgcacccaactgatcttcagcatcttttactttcaccagcgtttctgggtgagcaaaaacaggaaggcaaaatgccgcaaaaaagggaataagggcgacacggaaatgttgaatactcatactcttcctttttcaatattattgaagcatttatcagggttattgtctcatgagcggatacatatttgaatgtatttagaaaaataaacaaataggggttccgcgcacatttccccgaaaagtgccac

SEQ ID NO: 3 - DNA, 18967 bp, synthetic construct
  source 1..18967: mol_type = other DNA
gcggccgctaatacgactcactatagggccaactttgtttggtctgatgagtccgtgaggacgaaacccggagtcccgggtcaccaaacaaagttgggtaaggatagttcaatcaatgatcatcttctagtgcacttaggattcaagatcctattatcagggacaagagcaggattagggatatccgagatggccacacttttaaggagcttagcattgttcaaaagaaacaaggacaaaccacccattacatcaggatccggtggagccatcagaggaatcaaacacattattatagtaccaatccctggagattcctcaattaccactcgatccagacttctggaccggttggtgaggttaattggaaacccggatgtgagcgggcccaaactaacaggggcactaataggtatattatccttatttgtggagtctccaggtcaattgattcagaggatcaccgatgaccctgacgttagcataaggctgttagaggttgtccagagtgaccagtcacaatctggccttaccttcgcatcaagaggtaccaacatggaggatgaggcggaccaatacttttcacatgatgatccaattagtagtgatcaatccaggttcggatggttcgggaacaaggaaatctcagatattgaagtgcaagaccctgagggattcaacatgattctgggtaccatcctagcccaaatttgggtcttgctcgcaaaggcggttacggccccagacacggcagctgattcggagctaagaaggtggataaagtacacccaacaaagaagggtagttggtgaatttagattggagagaaaatggttggatgtggtgaggaacaggattgccgaggacctctccttacgccgattcatggtcgctctaatcctggatatcaagagaacacccggaaacaaacccaggattgctgaaatgatatgtgacattgatacatatatcgtagaggcaggattagccagttttatcctgactattaagtttgggatagaaactatgtatcctgctcttggactgcatgaatttgctggtgagttatccacacttgagtccttgatgaacctttaccagcaaatgggggaaactgcaccctacatggtaatcctggagaactcaattcagaacaagttcagtgcaggatcataccctctgctctggagctatgccatgggagtaggagtggaacttgaaaactccatgggaggtttgaactttggccgatcttactttgatccagcatattttagattagggcaagagatggtaaggaggtcagctggaaaggtcagttccacattggcatctgaactcggtatcactgccgaggatgcaaggcttgtttcagagattgcaatgcatactactgaggacaagatcagtagagcggttggacccagacaagcccaagtatcatttctacacggtgatcaaagtgagaatgagctaccgagattggggggcaaggaagataggagggtcaaacagagtcgaggagaagccagggagagctacagagaaaccgggcccagcagagcaagtgatgcgagagctgcccatcttccaaccggcacacccctagacattgacactgcaacggagtccagccaagatccgcaggacagtcgaaggtcagctgacgccctgcttaggctgcaagccatggcaggaatctcggaagaacaaggctcagacacggacacccctatagtgtacaatgacagaaatcttctagactaggtgcgagaggccgagggccagaacaacatccgcctaccatccatcattgttataaaaaacttaggaaccaggtccacacagccgccagcccatcaaccatccactcccacgattggagccaatggcagaagagcaggcacgccatgtcaaaaacggactggaatgcatccgggctctcaaggccgagcccatcggctcactggccatcgaggaagctatggcagcatggtcagaaatatcagacaacccaggacaggagcgagccacctgcagggaagagaaggcaggcagttcgggtctcagcaaaccatgcctctcagcaattggatcaactgaaggcggtgcacctcgcatccgcggtcagggacctggagagagcgatgacgacgctgaaactttgggaatccccccaagaaatctccaggcatcaagcactgggttacagtgttattacgtttatgatcacagcggtgaagcggttaagggaatccaagatgctgactctatcatggttcaatcaggccttgatggtgatagcaccctctcaggaggagacaatgaatctgaaaacagcgatgtggatattggcgaacctgataccgagggatatgctatcactgaccggggatctgctcccatctctatggggttcagggcttctgatgttgaaactgcagaaggaggggagatccacgagctcctgagactccaatccagaggcaacaactttccgaagcttgggaaaactctcaatgttcctccgcccccggaccccggtagggccagcacttccgggacacccattaaaaagggcacagacgcgagattagcctcatttggaacggagatcgcgtctttattgacaggtggtgcaacccaatgtgctcgaaagtcaccctcggaaccatcagggccaggtgcacctgcggggaatgtccccgagtgtgtgagcaatgccgcactgatacaggagtggacacccgaatctggtaccacaatctccccgagatcccagaataatgaagaagggggagactattatgatgatgagctgttctctgatgtccaagatattaaaacagccttggccaaaatacacgaggataatcagaagataatctccaagctagaatcactgctgttattgaagggagaagttgagtcaattaagaagcagatcaacaggcaaaatatcagcatatccaccctggaaggacacctctcaagcatcatgatcgccattcctggacttgggaaggatcccaacgaccccactgcagatgtcgaaatcaatcccgacttgaaacccatcataggcagagattcaggccgagcactggccgaagttctcaagaaacccgttgccagccgacaactccaaggaatgacaaatggacggaccagttccagaggacagctgctgaaggaatttcagctaaagccgatcgggaaaaagatgagctcagccgtcgggtttgttcctgacaccggccctgcatcacgcagtgtaatccgctccattataaaatccagccggctagaggaggatcggaagcgttacctgatgactctccttgatgatatcaaaggagccaatgatcttgccaagttccaccagatgctgatgaagataataatgaagtagctacagctcaacttacctgccaaccccatgccagtcgacccaactagtacaacctaaatccattataaaaaacttaggagcaaagtgattgcctcccaaggtccacaatgacagagacctacgacttcgacaagtcggcatgggacatcaaagggtcgatcgctccgatacaacccaccacctacagtgatggcaggctggtgccccaggtcagagtcatagatcctggtctaggcgacaggaaggatgaatgctttatgtacatgtttctgctgggggttgttgaggacagcgattccctagggcctccaatcgggcgagcatttgggttcctgcccttaggtgttggcagatccacagcaaagcccgaaaaactcctcaaagaggccactgagcttgacatagttgttagacgtacagcagggctcaatgaaaaactggtgttctacaacaacaccccactaactctcctcacaccttggagaaaggtcctaacaacagggagtgtcttcaacgcaaaccaagtgtgcaatgcggttaatctgataccgctcgataccccgcagaggttccgtgttgtttatatgagcatcacccgtctttcggataacgggtattacaccgttcctagaagaatgctggaattcagatcggtcaatgcagtggccttcaacctgctggtgacccttaggattgacaaggcgataggccctgggaagatcatcgacaatacagagcaacttcctgaggcaacatttatggtccacatcgggaacttcaggagaaagaagagtgaagtctactctgccgattattgcaaaatgaaaatcgaaaagatgggcctggtttttgcacttggtgggatagggggcaccagtcttcacattagaagcacaggcaaaatgagcaagactctccatgcacaactcgggttcaagaagaccttatgttacccgctgatggatatcaatgaagaccttaatcgattactctggaggagcagatgcaagatagtaagaatccaggcagttttgcagccatcagttcctcaagaattccgcatttacgacgacgtgatcataaatgatgaccaaggactattcaaagttctgtagaccgtagtgcccagcaatgcccgaaaacgacccccctcacaatgacagccagaaggcccggacaaaaaagccccctccgaaagactccacggaccaagcgagaggccagccagcagccgacggcaagcgcgaacaccaggcggccccagcacagaacagccctgacacaaggccaccaccagccaccccaatctgcatcctcctcgtgggacccccgaggaccaacccccaaggctgcccccgatccaaaccaccaaccgcatccccaccacccccgggaaagaaacccccagcaattggaaggcccctccccctcttcctcaacacaagaactccacaaccgaaccgcacaagcgaccgaggtgacccaaccgcaggcatccgactccctagacagatcctctctccccggcaaactaaacaaaacttagggccaaggaacatacacacccaacagaacccagaccccggcccacggcgccgcgcccccaacccccgacaaccagagggagcccccaaccaatcccgccggctcccccggtgcccacaggcagggacaccaacccccgaacagacccagcacccaaccatcgacaatccaagacgggggggcccccccaaaaaaaggcccccaggggccgacagccagcaccgcgaggaagcccacccaccccacacacgaccacggcaaccaaaccagaacccagaccaccctgggccaccagctcccagactcggccatcaccccgcagaaaggaaaggccacaacccgcgcaccccagccccgatccggcggggagccacccaacccgaaccagcacccaagagcgatccccgaaggacccccgaaccgcaaaggacatcagtatcccacagcctctccaagtcccccggtctcctcctcttctcgaagggaccaaaagatcaatccaccacacccgacgacactcaactccccacccctaaaggagacaccgggaatcccagaatcaagactcatccaatgtccatcatgggtctcaaggtgaacgtctctgccatattcatggcagtactgttaactctccaaacacccaccggtcaaatccattggggcaatctctctaagataggggtggtaggaataggaagtgcaagctacaaagttatgactcgttccagccatcaatcattagtcataaaattaatgcccaatataactctcctcaataactgcacgagggtagagattgcagaatacaggagactactgagaacagttttggaaccaattagagatgcacttaatgcaatgacccagaatataagaccggttcagagtgtagcttcaagtaggagacacaagagatttgcgggagtagtcctggcaggtgcggccctaggcgttgccacagctgctcagataacagccggcattgcacttcaccagtccatgctgaactctcaagccatcgacaatctgagagcgagcctggaaactactaatcaggcaattgagacaatcagacaagcagggcaggagatgatattggctgttcagggtgtccaagactacatcaataatgagctgataccgtctatgaaccaactatcttgtgatttaatcggccagaagctcgggctcaaattgctcagatactatacagaaatcctgtcattatttggccccagtttacgggaccccatatctgcggagatatctatccaggctttgagctatgcgcttggaggagacatcaataaggtgttagaaaagctcggatacagtggaggtgatttactgggcatcttagagagcggaggaataaaggcccggataactcacgtcgacacagagtcctacttcattgtcctcagtatagcctatccgacgctgtccgagattaagggggtgattgtccaccggctagagggggtctcgtacaacataggctctcaagagtggtataccactgtgcccaagtatgttgcaacccaagggtaccttatctcgaattttgatgagtcatcgtgtactttcatgccagaggggactgtgtgcagccaaaatgccttgtacccgatgagtcctctgctccaagaatgcctccgggggtacaccaagtcctgtgctcgtacactcgtatccgggtcttttgggaaccggttcattttatcacaagggaacctaatagccaattgtgcatcaatcctttgcaagtgttacacaacaggaacgatcattaatcaagaccctgacaagatcctaacatacattgctgccgatcactgcccggtagtcgaggtgaacggcgtgaccatccaagtcgggagcaggaggtatccagacgctgtgtacttgcacagaattgacctcggtcctcccatatcattggagaggttggacgtagggacaaatctggggaatgcaattgctaagttggaggatgccaaggaattgttggagtcatcggaccagatattgaggagtatgaaaggtttatcgagcactagcatagtctacatcctgattgcagtgtgtcttggagggttgatagggatccccgctttaatatgttgctgcagggggcgttgtaacaaaaagggagaacaagttggtatgtcaagaccaggcctaaagcctgatcttacgggaacatcaaaatcctatgtaaggtcgctctgatcctctacaactcttgaaacacaaatgtcccacaagtctcctcttcgtcatcaagcaaccaccgcacccagcatcaagcccacctgaaattatctccggcttccctctggccgaacaatatcggtagttaatcaaaacttagggtgcaagatcatccacaatgtcaccacaacgagaccggataaatgccttctacaaagataacccccatcccaagggaagtaggatagtcattaacagagaacatcttatgattgatagaccttatgttttgctggctgttctgtttgtcatgtttctgagcttgatcgggttgctagccattgcaggcattagacttcatcgggcagccatctacaccgcagagatccataaaagcctcagcaccaatctagatgtaactaactcaatcgagcatcaggtcaaggacgtgctgacaccactcttcaaaatcatcggtgatgaagtgggcctgaggacacctcagagattcactgacctagtgaaattaatctctgacaagattaaattccttaatccggatagggagtacgacttcagagatctcacttggtgtatcaacccgccagagagaatcaaattggattatgatcaatactgtgcagatgtggctgctgaagagctcatgaatgcattggtgaactcaactctactggagaccagaacaaccaatcagttcctagctgtctcaaagggaaactgctcagggcccactacaatcagaggtcaattctcaaacatgtcgctgtccctgttagacttgtatttaggtcgaggttacaatgtgtcatctatagtcactatgacatcccagggaatgtatgggggaacttacctagtggaaaagcctaatctgagcagcaaaaggtcagagttgtcacaactgagcatgtaccgagtgtttgaagtaggtgttatcagaaatccgggtttgggggctccggtgttccatatgacaaactatcttgagcaaccagtcagtaatgatctcagcaactgtatggtggctttgggggagctcaaactcgcagccctttgtcacggggaagattctatcacaattccctatcagggatcagggaaaggtgtcagcttccagctcgtcaagctaggtgtctggaaatccccaaccgacatgcaatcctgggtccccttatcaacggatgatccagtgatagacaggctttacctctcatctcacagaggtgttatcgctgacaatcaagcaaaatgggctgtcccgacaacacgaacagatgacaagttgcgaatggagacatgcttccaacaggcgtgtaagggtaaaatccaagcactctgcgagaatcccgagtgggcaccattgaaggataacaggattccttcatacggggtcttgtctgttgatctgagtctgacagttgagcttaaaatcaaaattgcttcgggattcgggccattgatcacacacggttcagggatggacctatacaaatccaaccacaacaatgtgtattggctgactatcccgccaatgaagaacctagccttaggtgtaatcaacacattggagtggataccgagattcaaggttagtccctacctcttcactgtcccaattaaggaagcaggcgaagactgccatgccccaacatacctacctgcggaggtggatggtgatgtcaaactcagttccaatctggtgattctacctggtcaagatctccaatatgttttggcaacctacgatacttccagggttgaacatgctgtggtttattacgtttacagcccaagccgctcattttcttacttttatccttttaggttgcctataaagggggtccccatcgaattacaagtggaatgcttcacatgggaccaaaaactctggtgccgtcacttctgtgtgcttgcggactcagaatctggtggacatatcactcactctgggatggtgggcatgggagtcagctgcacagtcacccgggaagatggaaccaatcgcagatagggctgctagtgaaccaatcacatgatgtcacccagacatcaggcatacccactagtgtgaaatagacatcagaattaagaaaaacgtagggtccaagtggttccccgttatggactcgctatctgtcaaccagatcttataccctgaagttcacctagatagcccgatagttaccaataagatagtagccatcctggagtatgctcgagtccctcacgcttacagcctggaggaccctacactgtgtcagaacatcaagcaccgcctaaaaaacggattttccaaccaaatgattataaacaatgtggaagttgggaatgtcatcaagtccaagcttaggagttatccggcccactctcatattccatatccaaattgtaatcaggatttatttaacatagaagacaaagagtcaacgaggaagatccgtgaactcctcaaaaaggggaattcgctgtactccaaagtcagtgataaggttttccaatgcttaagggacactaactcacggcttggcctaggctccgaattgagggaggacatcaaggagaaagttattaacttgggagtttacatgcacagctcccagtggtttgagccctttctgttttggtttacagtcaagactgagatgaggtcagtgattaaatcacaaacccatacttgccataggaggagacacacacctgtattcttcactggtagttcagttgagttgctaatctctcgtgaccttgttgctataatcagtaaagagtctcaacatgtatattacctgacatttgaactggttttgatgtattgtgatgtcatagaggggaggttaatgacagagaccgctatgactattgatgctaggtatacagagcttctaggaagagtcagatacatgtggaaactgatagatggtttcttccctgcactcgggaatccaacttatcaaattgtagccatgctggagcctctttcacttgcttacctgcagctgagggatataacagtagaactcagaggtgctttccttaaccactgctttactgaaatacatgatgttcttgaccaaaacgggttttctgatgaaggtacttatcatgagttaactgaagctctagattacattttcataactgatgacatacatctgacaggggagattttctcatttttcagaagtttcggccaccccagacttgaagcagtaacggctgctgaaaatgttaggaaatacatgaatcagcctaaagtcattgtgtatgagactctgatgaaaggtcatgccatattttgtggaatcataatcaacggctatcgtgacaggcacggaggcagttggccaccgctgaccctccccctgcatgctgcagacacaatccggaatgctcaagcttcaggtgaagggttaacacatgagcagtgcgttgataactggaaatcttttgctggagtgaaatttggctgctttatgcctcttagcctggatagtgatctgacaatgtacctaaaggacaaggcacttgctgctctccaaagggaatgggattcagtttacccgaaagagttcctgcgttacgaccctcccaagggaaccgggtcacggaggcttgtagatgttttccttaatgattcgagctttgacccatatgatgtgataatgtatgttgtaagtggagcttacctccatgaccctgagttcaacctgtcttacagcctgaaagaaaaggagatcaaggaaacaggtagactttttgctaaaatgacttacaaaatgagggcatgccaagtgattgctgaaaatctaatctcaaacgggattggcaaatattttaaggacaatgggatggccaaggatgagcacgatttgactaaggcactccacactctagctgtctcaggagtccccaaagatctcaaagaaagtcacaggggggggccagtcttaaaaacctactcccgaagcccagtccacacaagtaccaggaacgtgagagcagcaaaagggtttatagggttccctcaagtaattcggcaggaccaagacactgatcatccggagaatatggaagcttacgagacagtcagtgcatttatcacgactgatctcaagaagtactgccttaattggagatatgagaccatcagcttgtttgcacagaggctaaatgagatttacggattgccctcatttttccagtggctgcataagaggcttgagacctctgtcctgtatgtaagtgaccctcattgcccccccgaccttgacgcccatatcccgttatataaagtccccaatgatcaaatcttcattaagtaccctatgggaggtatagaagggtattgtcagaagctgtggaccatcagcaccattccctatctatacctggctgcttatgagagcggagtaaggattgcttcgttagtgcaaggggacaatcagaccatagccgtaacaaaaagggtacccagcacatggccctacaaccttaagaaacgggaagctgctagagtaactagagattactttgtaattcttaggcaaaggctacatgatattggccatcacctcaaggcaaatgagacaattgtttcatcacatttttttgtctattcaaaaggaatatattatgatgggctacttgtgtcccaatcactcaagagcatcgcaagatgtgtattctggtcagagactatagttgatgaaacaagggcagcatgcagtaatattgctacaacaatggctaaaagcatcgagagaggttatgaccgttaccttgcatattccctgaacgtcctaaaagtgatacagcaaattctgatctctcttggcttcacaatcaattcaaccatgacccgggatgtagtcatacccctcctcacaaacaacgacctcttaataaggatggcactgttgcccgctcctattggggggatgaattatctgaatatgagcaggctgtttgtcagaaacatcggtgatccagtaacatcatcaattgctgatctcaagagaatgattctcgcctcactaatgcctgaagagaccctccatcaagtaatgacacaacaaccgggggactcttcattcctagactgggctagcgacccttactcagcaaatcttgtatgtgtccagagcatcactagactcctcaagaacataactgcaaggtttgtcctgatccatagtccaaacccaatgttaaaaggattattccatgatgacagtaaagaagaggacgagggactggcggcattcctcatggacaggcatattatagtacctagggcagctcatgaaatcctggatcatagtgtcacaggggcaagagagtctattgcaggcatgctggataccacaaaaggcttgattcgagccagcatgaggaagggggggttaacctctcgagtgataaccagattgtccaattatgactatgaacaattcagagcagggatggtgctattgacaggaagaaagagaaatgtcctcattgacaaagagtcatgttcagtgcagctggcgagagctctaagaagccatatgtgggcgaggctagctcgaggacggcctatttacggccttgaggtccctgatgtactagaatctatgcgaggccaccttattcggcgtcatgagacatgtgtcatctgcgagtgtggatcagtcaactacggatggttttttgtcccctcgggttgccaactggatgatattgacaaggaaacatcatccttgagagtcccatatattggttctaccactgatgagagaacagacatgaagcttgccttcgtaagagccccaagtcgatccttgcgatctgctgttagaatagcaacagtgtactcatgggcttacggtgatgatgatagctcttggaacgaagcctggttgttggctaggcaaagggccaatgtgagcctggaggagctaagggtgatcactcccatctcaacttcgactaatttagcgcataggttgagggatcgtagcactcaagtgaaatactcaggtacatcccttgtccgagtggcgaggtataccacaatctccaacgacaatctctcatttgtcatatcagataagaaggttgatactaactttatataccaacaaggaatgcttctagggttgggtgttttagaaacattgtttcgactcgagaaagataccggatcatctaacacggtattacatcttcacgtcgaaacagattgttgcgtgatcccgatgatagatcatcccaggatacccagctcccgcaagctagagctgagggcagagctatgtaccaacccattgatatatgataatgcacctttaattgacagagatgcaacaaggctatacacccagagccataggaggcaccttgtggaatttgttacatggtccacaccccaactatatcacattttagctaagtccacagcactatctatgattgacctggtaacaaaatttgagaaggaccatatgaatgaaatttcagctctcataggggatgacgatatcaatagtttcataactgagtttctgctcatagagccaagattattcactatctacttgggccagtgtgcggccatcaattgggcatttgatgtacattatcatagaccatcagggaaatatcagatgggtgagctgttgtcatcgttcctttctagaatgagcaaaggagtgtttaaggtgcttgtcaatgctctaagccacccaaagatctacaagaaattctggcattgtggtattatagagcctatccatggtccttcacttgatgctcaaaacttgcacacaactgtgtgcaacatggtttacacatgctatatgacctacctcgacctgttgttgaatgaagagttagaagagttcacatttctcttgtgtgaaagcgacgaggatgtagtaccggacagattcgacaacatccaggcaaaacacttatgtgttctggcagatttgtactgtcaaccagggacctgcccaccaattcgaggtctaagaccggtagagaaatgtgcagttctaaccgaccatatcaaggcagaggctatgttatctccagcaggatcttcgtggaacataaatccaattattgtagaccattactcatgctctctgacttatctccggcgaggatcgatcaaacagataagattgagagttgatccaggattcattttcgacgccctcgctgaggtaaatgtcagtcagccaaagatcggcagcaacaacatctcaaatatgagcatcaaggctttcagacccccacacgatgatgttgcaaaattgctcaaagatatcaacacaagcaagcacaatcttcccatttcagggggcaatctcgccaattatgaaatccatgctttccgcagaatcgggttgaactcatctgcttgctacaaagctgttgagatatcaacattaattaggagatgccttgagccaggggaggacggcttgttcttgggtgagggatcgggttctatgttgatcacttataaagagatacttaaactaaacaagtgcttctataatagtggggtttccgccaattctagatctggtcaaagggaattagcaccctatccctccgaagttggccttgtcgaacacagaatgggagtaggtaatattgtcaaagtgctctttaacgggaggcccgaagtcacgtgggtaggcagtgtagattgcttcaatttcatagttagtaatatccctacctctagtgtggggtttatccattcagatatagagaccttgcctgacaaagatactatagagaagctagaggaattggcagccatcttatcgatggctctgctcctgggcaaaataggatcaatactggtgattaagcttatgcctttcagcggggattttgttcagggatttataagttatgtagggtctcattatagagaagtgaaccttgtataccctagatacagcaacttcatctctactgaatcttatttggttatgacagatctcaaggctaaccggctaatgaatcctgaaaagattaagcagcagataattgaatcatctgtgaggacttcacctggacttataggtcacatcctatccattaagcaactaagctgcatacaagcaattgtgggagacgcagttagtagaggtgatatcaatcctactctgaaaaaacttacacctatagagcaggtgctgatcaattgcgggttggcaattaacggacctaagctgtgcaaagaattgatccaccatgatgttgcctcagggcaagatggattgcttaattctatactcatcctctacagggagttggcaagattcaaagacaaccaaagaagtcaacaagggatgttccacgcttaccccgtattggtaagtagcaggcaacgagaacttatatctaggatcacccgcaaattctgggggcacattcttctttactccgggaacaaaaagttgataaataagtttatccagaatctcaagtccggctatctgatactagacttacaccagaatatcttcgttaagaatctatccaagtcagagaaacagattattatgacggggggtttgaaacgtgagtgggtttttaaggtaacagtcaaggagaccaaagaatggtataagttagtcggatacagtgccctgattaaggactaattggttgaactccggaaccctaatcctgccctaggtggttaggcattatttgcaatatattaaagaaaactttgaaaatacgaagtttctattcccagctttgtctggtggccggcatggtcccagcctcctcgctggcgccggctgggcaacattccgaggggaccgtcccctcggtaatggcgaatgggacgcggccgatccggctgctaacaaagcccgaaaggaagctgagttggctgctgccaccgctgagcaataactagcataaccccttggggcctctaaacgggtcttgaggggttttttgctgaaaggaggaactatatccggatgcggccgcgggccctatggtacccagcttttgttccctttagtgagggttaattccgagcttggcgtaatcatggtcatagctgtttcctgtgtgaaattgttatccgctcacaattccacacaacataggagccggaagcataaagtgtaaagcctggggtgcctaatgagtgaggtaactcacattaattgcgttgcgctcactgcccgctttccagtcgggaaacctgtcgtgccagctgcattaatgaatcggccaacgcgcggggagaggcggtttgcgtattgggcgctcttccgcttcctcgctcactgactcgctgcgctcggtcgttcggctgcggcgagcggtatcagctcactcaaaggcggtaatacggttatccacagaatcaggggataacgcaggaaagaacatgtgagcaaaaggccagcaaaaggccaggaaccgtaaaaaggccgcgttgctggcgtttttccataggctcggcccccctgacgagcatcacaaaaatcgacgctcaagtcagaggtggcgaaacccgacaggactataaagataccaggcgttcccccctggaagctccctcgtgcgctctcctgttccgaccctgccgcttaccggatacctgtccgcctttctcccttcgggaagcgtggcgctttctcaatgctcacgctgtaggtatctcagttcggtgtaggtcgttcgctccaagctgggctgtgtgcacgaaccccccgttcagcccgaccgctgcgccttatccggtaactatcgtcttgagtccaacccggtaagacacgacttatcgccactggcagcagccactggtaacaggattagcagagcgaggtatgtaggcggtgctacagagttcttgaagtggtggcctaactacggctacactagaaggacagtatttggtatctgcgctctgctgaagccagttaccttcggaaaaagagttggtagctcttgatccggcaaacaaaccaccgctggtagcggtggtttttttgtttgcaagcagcagattacgcgcagaaaaaaaggatctcaagaagatcctttgatcttttctacggggtctgacgctcagtggaacgaaaactcacgttaagggattttggtcatgagattatcaaaaaggatcttcacctagatccttttaaattaaaaatgaagttttaaatcaatctaaagtatatatgagtaaacttggtctgacagttaccaatgcttaatcagtgaggcacctatctcagcgatctgtctatttcgttcatccatagttgcctgactgcccgtcgtgtagataactacgatacgggagggcttaccatctggccccagtgctgcaatgataccgcgagacccacgctcaccggctccagatttatcagcaataaaccagccagccggaagggccgagcgcagaagtggtcctgcaactttatccgcctccatccagtctattaattgttgccgggaagctagagtaagtagttcgccagttaatagtttgcgcaacgttgttgccattgctacaggcatcgtggtgtcacgctcgtcgtttggtatggcttcattcagctccggttcccaacgatcaaggcgagttacatgatcccccatgttgtgaaaaaaagcggttagctccttcggtcctccgatcgttgtcagaagtaagttggccgcagtgttatcactcatgcttatggcagcactgcataattctcttactgtcatgccatccgtaagatgcttttctgtgactggtgagtactcaaccaagtcattctgagaatagtgtatgcggcgaccgagttgctcttgcccggcgtcaatacgggataataccgcgccacatagcagaactttaaaagtgctcatcattggaaaacgttcttcggggcgaaaactctcaaggatcttaccgctgttgagatccagttcgatgtaacccactcgtgcacccaactgatcttcagcatcttttactttcaccagcgtttctgggtgagcaaaaacaggaaggcaaaatgccgcaaaaaagggaataagggcgacacggaaatgttgaatactcatactcttcctttttcaatattattgaagcatttatcagggttattgtctcatgagcggatacatatttgaatgtatttagaaaaataaacaaataggggttccgcgcacatttccccgaaaagtgccacctgaaattgtaaacgttaatattttgttaaaattcgcgttaaatttttgttaaatcagctcattttttaaccaataggccgaaatcggcaaaatcccttataaatcaaaagaatagaccgagatagggttgagtgttgttccagtttggaacaagagtccactattaaagaacgtggactccaacgtcaaagggcgaaaaaccgtctatcagggcgatggcccactacgtgaaccatcaccctaatcaagttttttggggtcgaggtgccgtaaagcactaaatcggaaccctaaagggagcccccgatttagagcttgacggggaaagccggcgaacgtggcgagaaaggaagggaagaaagcgaaaggagcgggcgctagggcgctggcaagtgtagcggtcacgctgcgcgtaaccaccacacccgccgcgcttaatgcgccgctacagggcgcgtcccattcgccattcaggctgcgcaactgttgggaagggcgatcggtgcgggcctcttcgctattacgccagccaccgcggtg

SEQ ID NO: 4 - protein, 21 aa, synthetic construct
GSGEGRGSLLTCGDVEENPGP

SEQ ID NO: 5 - protein, 22 aa, synthetic construct
GSGATNFSLLKQAGDVEENPGP

SEQ ID NO: 6 - protein, 23 aa, synthetic construct
GSGQCTNYALLKLAGDVESNPGP

SEQ ID NO: 7 - protein, 25 aa, synthetic construct
GSGVKQTLNFDLLKLAGDVESNPGP

SEQ ID NO: 8 - protein, 18 aa, Thosea asigna virus
EGRGSLLTCGDVEENPGP

SEQ ID NO: 9 - protein, 19 aa, Teschovirus A
ATNFSLLKQAGDVEENPGP

SEQ ID NO: 10 - protein, 20 aa, Equine rhinitis A virus
QCTNYALLKLAGDVESNPGP

SEQ ID NO: 11 - protein, 22 aa, Foot-and-mouth disease virus
VKQTLNFDLLKLAGDVESNPGP

SEQ ID NO: 12-13 - skipped (2 entries)

SEQ ID NO: 14 - protein, 4 aa, synthetic construct
RGRR

SEQ ID NO: 15 - protein, 4 aa, synthetic construct
RARR

SEQ ID NO: 16 - protein, 4 aa, synthetic construct
RLRR

SEQ ID NO: 17 - protein, 4 aa, synthetic construct
RMRR

SEQ ID NO: 18 - protein, 4 aa, synthetic construct
RFRR

SEQ ID NO: 19 - protein, 4 aa, synthetic construct
RWRR

SEQ ID NO: 20 - protein, 4 aa, synthetic construct
RKRR

SEQ ID NO: 21 - protein, 4 aa, synthetic construct
RQRR

SEQ ID NO: 22 - protein, 4 aa, synthetic construct
RERR

SEQ ID NO: 23 - protein, 4 aa, synthetic construct
RSRR

SEQ ID NO: 24 - protein, 4 aa, synthetic construct
RPRR

SEQ ID NO: 25 - protein, 4 aa, synthetic construct
RVRR

SEQ ID NO: 26 - protein, 4 aa, synthetic construct
RIRR

SEQ ID NO: 27 - protein, 4 aa, synthetic construct
RCRR

SEQ ID NO: 28 - protein, 4 aa, synthetic construct
RYRR

SEQ ID NO: 29 - protein, 4 aa, synthetic construct
RHRR

SEQ ID NO: 30 - protein, 4 aa, synthetic construct
RRRR

SEQ ID NO: 31 - protein, 4 aa, synthetic construct
RNRR

SEQ ID NO: 32 - protein, 4 aa, synthetic construct
RDRR

SEQ ID NO: 33 - protein, 4 aa, synthetic construct
RTRR

SEQ ID NO: 34 - protein, 4 aa, synthetic construct
RGKR

SEQ ID NO: 35 - protein, 4 aa, synthetic construct
RAKR

SEQ ID NO: 36 - protein, 4 aa, synthetic construct
RLKR

SEQ ID NO: 37 - protein, 4 aa, synthetic construct
RMKR

SEQ ID NO: 38 - protein, 4 aa, synthetic construct
RFKR

SEQ ID NO: 39 - protein, 4 aa, synthetic construct
RWKR

SEQ ID NO: 40 - protein, 4 aa, synthetic construct
RKKR

SEQ ID NO: 41 - protein, 4 aa, synthetic construct
RQKR

SEQ ID NO: 42 - protein, 4 aa, synthetic construct
REKR

SEQ ID NO: 43 - protein, 4 aa, synthetic construct
RSKR

SEQ ID NO: 44 - protein, 4 aa, synthetic construct
RPKR

SEQ ID NO: 45 - protein, 4 aa, synthetic construct
RVKR

SEQ ID NO: 46 - protein, 4 aa, synthetic construct
RIKR

SEQ ID NO: 47 - protein, 4 aa, synthetic construct
RCKR

SEQ ID NO: 48 - protein, 4 aa, synthetic construct
RYKR

SEQ ID NO: 49 - protein, 4 aa, synthetic construct
RHKR

SEQ ID NO: 50 - protein, 4 aa, synthetic construct
RRKR

SEQ ID NO: 51 - protein, 4 aa, synthetic construct
RNKR

SEQ ID NO: 52 - protein, 4 aa, synthetic construct
RDKR

SEQ ID NO: 53 - protein, 4 aa, synthetic construct
RTKR

SEQ ID NO: 54 - protein, 480 aa, Human alphaherpesvirus 2
MALGRVGLAVGLWGLLWVGVVVVLANASPGRTITVGPRGNASNAAPSASPRNASAPRTTPTPPQPRKATKSKASTAKPAPPPKTGPPKTSSEPVRCNRHDPLARYGSRVQIRCRFPNSTRTESRLQIWRYATATDAEIGTAPSLEEVMVNVSAPPGGQLVYDSAPNRTDPHVIWAEGAGPGASPRLYSVVGPLGRQRLIIEELTLETQGMYYWVWGRTDRPSAYGTWVRVRVFRPPSLTIHPHAVLEGQPFKATCTAATYYPGNRAEFVWFEDGRRVFDPAQIHTQTQENPDGFSTVSTVTSAAVGGQGPPRTFTCQLTWHRDSVSFSRRNASGTASVLPRPTITMEFTGDHAVCTAGCVPEGVTFAWFLGDDSSPAEKVAVASQTSCGRPGTATIRSTLPVSYEQTEYICRLAGYPDGIPVLEHHGSHQPPPRDPTERQVIRAVEGAGIGVAVLVAVVLAGTAVVYLTHASSVRYRRLR

SEQ ID NO: 55 - protein, 901 aa, Human alphaherpesvirus 2
MRGGGLVCALVVGALVAAVASAAPAAPRASGGVAATVAANGGPASQPPPVPSPATTKARKRKTKKPPKRPEATPPPDANATVAAGHATLRAHLREIKVENADAQFYVCPPPTGATVVQFEQPRRCPTRPEGQNYTEGIAVVFKENIAPYKFKATMYYKDVTVSQVWFGHRYSQFMGIFEDRAPVPFEEVIDKINAKGVCRSTAKYVRNNMETTAFHRDDHETDMELKPAKVATRTSRGWHTTDLKYNPSRVEAFHRYGTTVNCIVEEVDARSVYPYDEFVLATGDFVYMSPFYGYREGSHTEHTSYAADRFKQVDGFYARDLTTKARATSPTTRNLLTTPKFTVAWDWVPKRPAVCTMTKWQEVDEMLRAEYGGSFRFSSDAISTTFTTNLTQYSLSRVDLGDCIGRDAREAIDRMFARKYNATHIKVGQPQYYLATGGFLIAYQPLLSNTLAELYVREYMREQDRKPRNATPAPLREAPSANASVERIKTTSSIEFARLQFTYNHIQRHVNDMLGRIAVAWCELQNHELTLWNEARKLNPNAIASATVGRRVSARMLGDVMAVSTCVPVAPDNVIVQNSMRVSSRPGTCYSRPLVSFRYEDQGPLIEGQLGENNELRLTRDALEPCTVGHRRYFIFGGGYVYFEEYAYSHQLSRADVTTVSTFIDLNITMLEDHEFVPLEVYTRHEIKDSGLLDYTEVQRRNQLHDLRFADIDTVIRADANAAMFAGLCAFFEGMGDLGRAVGKVVMGVVGGVVSAVSGVSSFMSNPFGALAVGLLVLAGLVAAFFAFRYVLQLQRNPMKALYPLTTKELKTSDPGGVGGEGEEGAEGGGFDEAKLAEAREMIRYMALVSAMERTEHKARKKGTSALLSSKVTNMVLRKRNKARYSPLHNEDEAGDEDEL

SEQ ID NO: 56 - protein, 393 aa, Human alphaherpesvirus 2
MGRLTSGVGTAALLVVAVGLRVVCAKYALADPSLKMADPNRFRGKNLPVLDQLTDPPGVKRVYHIQPSLEDPFQPPSIPITVYYAVLERACRSVLLHAPSEAPQIVRGASDEARKHTYNLTIAWYRMGDNCAIPITVMEYTECPYNKSLGVCPIRTQPRWSYYDSFSAVSEDNLGFLMHAPAFETAGTYLRLVKINDWTEITQFILEHRARASCKYALPLRIPPAACLTSKAYQQGVTVDSIGMLPRFIPENQRTVALYSLKIAGWHGPKPPYTSTLLPPELSDTTNATQPELVPEDPEDSALLEDPAGTVSSQIPPNWHIPSIQDVAPHHAPAAPSNPGLIIGALAGSTLAVLVIGGIAFWVRRRAQMAPKRLRLPHIRDDDAPPSHQPLFY

SEQ ID NO: 57 - protein, 480 aa, Human alphaherpesvirus 2
MALGRVGLAVGLWGLLWVGVVVVLANASPGRTITVGPRGNASNAAPSASPRNASAPRTTPTPPQPRKATKSKASTAKPAPPPKTGPPKTSSEPVRCNRHDPLARYGSRVQIRCRFPNSTRTESRLQIWRYATATDAEIGTAPSLEEVMVNVSAPPGGQLVYDSAPNRTDPHVIWAEGAGPGASPRLYSVVGPLGRQRLIIEELTLETQGMYYWVWGRTDRPSAYGTWVRVRVFRPPSLTIHPHAVLEGQPFKATCTAATYYPGNRAEFVWFEDGRRVFDPAQIHTQTQENPDGFSTVSTVTSAAVGGQGPPRTFTCQLTWHRDSVSASRRNASGTASVLPRPTITMEFTGDHAVCTAGCVPEGVTFAWFLGDDSSPAEKVAVASQTSCGRPGTATIRSTLPVSYEQTEYICRLAGYPDGIPVLEHHGSHQPPPRDPTERQVIRAVEGAGIGVAVLVAVVLAGTAVVYLTHASSVRYRRLR

SEQ ID NO: 58 - protein, 901 aa, Human alphaherpesvirus 2
MRGGGLVCALVVGALVAAVASAAPAAPRASGGVAATVAANGGPASQPPPVPSPATTKARKRKTKKPPKRPEATPPPDANATVAAGHATLRAHLREIKVENADAQFYVCPPPTGATVVQFEQPRRCPTRPEGQNYTEGIAVVFKENIAPYKFKATMYYKDVTVSQVWFGHRYSQFMGIFEDRAPVPFEEVIDKINAKGVCRSTAKYVRNNMETTAFHRDDHETDMELKPAKVATRTSRGWHTTDLKYNPSRVEAFHRYGTTVNCIVEEVDARSVYPYDEFVLATGDFVYMSPFYGYREGSHTEHTSYAADRFKQVDGFYARDLTTKARATSPTTRNLLTTPKFTVAWDWVPKRPAVCTMTKWQEVDEMLRAEYGGSFRFSSDAISTTFTTNLTQYSLSRVDLGDCIGRDAREAIDRMFARKYNATHIKVGQPQYYLATGGFLIAYQPLLSNTLAELYVREYMREQDRKPRNATPAPLREAPSANASVERIKTTSSIEFARLQFTYNHIQRHVNDMLGRIAVAWCELQNHELTLWNEARKLNPNAIASATVGRRVSARMLGDVMAVSTCVPVAPDNVIVQNSMRVSSRPGTCYSRPLVSFRYEDQGPLIEGQLGENNELRLTRDALEPCTVGHRRYFIFGGGYVYFEEYAYSHQLSRADVTTVSTFADLNITMLEDAEAVPLEVYTRHEIKDSGLLDYTEVQRRNQLHDLRFADIDTVIRADANAAMFAGLCAFFEGMGDLGRAVGKVVMGVVGGVVSAVSGVSSFMSNPFGALAVGLLVLAGLVAAFFAFRYVLQLQRNPMKALYPLTTKELKTSDPGGVGGEGEEGAEGGGFDEAKLAEAREMIRYMALVSAMERTEHKARKKGTSALLSSKVTNMVLRKRNKARYSPLHNEDEAGDEDEL

SEQ ID NO: 59 - DNA, 17454 bp, synthetic construct
  source 1..17454: mol_type = other DNA
accaaacaaagttgggtaaggatagttcaatcaatgatcatcttctagtgcacttaggattcaagatcctattatcagggacaagagcaggattagggatatccgagatggccacacttttaaggagcttagcattgttcaaaagaaacaaggacaaaccacccattacatcaggatccggtggagccatcagaggaatcaaacacattattatagtaccaatccctggagattcctcaattaccactcgatccagacttctggaccggttggtgaggttaattggaaacccggatgtgagcgggcccaaactaacaggggcactaataggtatattatccttatttgtggagtctccaggtcaattgattcagaggatcaccgatgaccctgacgttagcataaggctgttagaggttgtccagagtgaccagtcacaatctggccttaccttcgcatcaagaggtaccaacatggaggatgaggcggaccaatacttttcacatgatgatccaattagtagtgatcaatccaggttcggatggttcgggaacaaggaaatctcagatattgaagtgcaagaccctgagggattcaacatgattctgggtaccatcctagcccaaatttgggtcttgctcgcaaaggcggttacggccccagacacggcagctgattcggagctaagaaggtggataaagtacacccaacaaagaagggtagttggtgaatttagattggagagaaaatggttggatgtggtgaggaacaggattgccgaggacctctccttacgccgattcatggtcgctctaatcctggatatcaagagaacacccggaaacaaacccaggattgctgaaatgatatgtgacattgatacatatatcgtagaggcaggattagccagttttatcctgactattaagtttgggatagaaactatgtatcctgctcttggactgcatgaatttgctggtgagttatccacacttgagtccttgatgaacctttaccagcaaatgggggaaactgcaccctacatggtaatcctggagaactcaattcagaacaagttcagtgcaggatcataccctctgctctggagctatgccatgggagtaggagtggaacttgaaaactccatgggaggtttgaactttggccgatcttactttgatccagcatattttagattagggcaagagatggtaaggaggtcagctggaaaggtcagttccacattggcatctgaactcggtatcactgccgaggatgcaaggcttgtttcagagattgcaatgcatactactgaggacaagatcagtagagcggttggacccagacaagcccaagtatcatttctacacggtgatcaaagtgagaatgagctaccgagattggggggcaaggaagataggagggtcaaacagagtcgaggagaagccagggagagctacagagaaaccgggcccagcagagcaagtgatgcgagagctgcccatcttccaaccggcacacccctagacattgacactgcaacggagtccagccaagatccgcaggacagtcgaaggtcagctgacgccctgcttaggctgcaagccatggcaggaatctcggaagaacaaggctcagacacggacacccctatagtgtacaatgacagaaatcttctagactaggtgcgagaggccgagggccagaacaacatccgcctaccatccatcattgttataaaaaacttaggaaccaggtccacacagccgccagcccatcaaccatccactcccacgattggagccaatggcagaagagcaggcacgccatgtcaaaaacggactggaatgcatccgggctctcaaggccgagcccatcggctcactggccatcgaggaagctatggcagcatggtcagaaatatcagacaacccaggacaggagcgagccacctgcagggaagagaaggcaggcagttcgggtctcagcaaaccatgcctctcagcaattggatcaactgaaggcggtgcacctcgcatccgcggtcagggacctggagagagcgatgacgacgctgaaactttgggaatccccccaagaaatctccaggcatcaagcactgggttacagtgttattacgtttatgatcacagcggtgaagcggttaagggaatccaagatgctgactctatcatggttcaatcaggccttgatggtgatagcaccctctcaggaggagacaatgaatctgaaaacagcgatgtggatattggcgaacctgataccgagggatatgctatcactgaccggggatctgctcccatctctatggggttcagggcttctgatgttgaaactgcagaaggaggggagatccacgagctcctgagactccaatccagaggcaacaactttccgaagcttgggaaaactctcaatgttcctccgcccccggaccccggtagggccagcacttccgggacacccattaaaaagggcacagacgcgagattagcctcatttggaacggagatcgcgtctttattgacaggtggtgcaacccaatgtgctcgaaagtcaccctcggaaccatcagggccaggtgcacctgcggggaatgtccccgagtgtgtgagcaatgccgcactgatacaggagtggacacccgaatctggtaccacaatctccccgagatcccagaataatgaagaagggggagactattatgatgatgagctgttctctgatgtccaagatattaaaacagccttggccaaaatacacgaggataatcagaagataatctccaagctagaatcactgctgttattgaagggagaagttgagtcaattaagaagcagatcaacaggcaaaatatcagcatatccaccctggaaggacacctctcaagcatcatgatcgccattcctggacttgggaaggatcccaacgaccccactgcagatgtcgaaatcaatcccgacttgaaacccatcataggcagagattcaggccgagcactggccgaagttctcaagaaacccgttgccagccgacaactccaaggaatgacaaatggacggaccagttccagaggacagctgctgaaggaatttcagctaaagccgatcgggaaaaagatgagctcagccgtcgggtttgttcctgacaccggccctgcatcacgcagtgtaatccgctccattataaaatccagccggctagaggaggatcggaagcgttacctgatgactctccttgatgatatcaaaggagccaatgatcttgccaagttccaccagatgctgatgaagataataatgaagtagctacagctcaacttacctgccaaccccatgccagtcgacccaactagcctaccctccatcattgttataaaaaacttaggaaccaggtccacacagccgccagcccatcaacgcgtacggccaccatggcattgggtagagttggtttggctgtgggactttggggtctcctctgggtcggtgtggttgtcgtactggctaacgcttctccaggccgcactattactgttggaccgagagggaacgcttccaacgctgctccctctgcctcccctaggaacgcttctgctcctagaactacacctactccaccgcaaccccgcaaagcaaccaaaagcaaggcctcaaccgctaaaccagctcctccaccgaagacaggcccacctaaaaccagcagcgagcccgtgcggtgtaatcgacacgatcccctggcccgatacggtagtcgggtgcaaatccgctgtaggtttcctaatagtactagaacagaaagcaggctgcagatctggagatacgccactgccactgacgcagaaatcgggaccgccccttcccttgaggaggtgatggtgaacgtaagcgctccaccaggaggtcagctcgtctacgactcagcacccaataggaccgatccacacgtgatttgggcagaaggagctggaccaggcgcctctccaaggttgtattccgttgtaggcccactgggtcggcagagactgattatcgaagaactgactctggaaacccagggaatgtactattgggtttggggaaggactgataggcctagtgcttacggtacttgggtgagagtcagggtatttcggcctccttccctgactatacacccacacgcagtgctcgagggtcagcctttcaaggccacttgcacagccgcaacttactaccctgggaaccgagcagagtttgtgtggtttgaagacgggcggagagtttttgaccccgcacagatccacacgcagacccaggaaaaccctgacggattctccaccgttagcactgtgacctctgccgcagttggaggacaaggaccgccaaggaccttcacctgtcagctgacctggcaccgcgactctgtttcagcgtctagacggaacgcgagcggtactgcctctgtgctccccagacccacaatcacaatggagttcaccggcgatcacgccgtgtgtacggctggttgtgtacccgaaggcgtgacctttgcttggtttttgggagacgatagctcacctgccgagaaagtcgcagtggcttcacaaacttcctgcggaaggcccgggactgccactatccgatctacgctccccgtgtcttacgagcagacagaatatatttgccgactggcaggatatccagacggaatacccgtcctggaacaccacggttctcaccagcctccaccgagagatccaaccgagcgacaggtaatcagagccgtggaaggagcgggtattggcgtggcagttctcgttgctgtcgtacttgccggcacggctgttgtgtatctcactcacgccagcagcgtgcgatacaggcgcctcagatgataagcgcgcagcgcttagacgtctcgcgatcgatactagtacaacctaaatccattataaaaaacttaggagcaaagtgattgcctcccaaggtccacaatgacagagacctacgacttcgacaagtcggcatgggacatcaaagggtcgatcgctccgatacaacccaccacctacagtgatggcaggctggtgccccaggtcagagtcatagatcctggtctaggcgacaggaaggatgaatgctttatgtacatgtttctgctgggggttgttgaggacagcgattccctagggcctccaatcgggcgagcatttgggttcctgcccttaggtgttggcagatccacagcaaagcccgaaaaactcctcaaagaggccactgagcttgacatagttgttagacgtacagcagggctcaatgaaaaactggtgttctacaacaacaccccactaactctcctcacaccttggagaaaggtcctaacaacagggagtgtcttcaacgcaaaccaagtgtgcaatgcggttaatctgataccgctcgataccccgcagaggttccgtgttgtttatatgagcatcacccgtctttcggataacgggtattacaccgttcctagaagaatgctggaattcagatcggtcaatgcagtggccttcaacctgctggtgacccttaggattgacaaggcgataggccctgggaagatcatcgacaatacagagcaacttcctgaggcaacatttatggtccacatcgggaacttcaggagaaagaagagtgaagtctactctgccgattattgcaaaatgaaaatcgaaaagatgggcctggtttttgcacttggtgggatagggggcaccagtcttcacattagaagcacaggcaaaatgagcaagactctccatgcacaactcgggttcaagaagaccttatgttacccgctgatggatatcaatgaagaccttaatcgattactctggaggagcagatgcaagatagtaagaatccaggcagttttgcagccatcagttcctcaagaattccgcatttacgacgacgtgatcataaatgatgaccaaggactattcaaagttctgtagaccgtagtgcccagcaatgcccgaaaacgacccccctcacaatgacagccagaaggcccggacaaaaaagccccctccgaaagactccacggaccaagcgagaggccagccagcagccgacggcaagcgcgaacaccaggcggccccagcacagaacagccctgacacaaggccaccaccagccaccccaatctgcatcctcctcgtgggacccccgaggaccaacccccaaggctgcccccgatccaaaccaccaaccgcatccccaccacccccgggaaagaaacccccagcaattggaaggcccctccccctcttcctcaacacaagaactccacaaccgaaccgcacaagcgaccgaggtgacccaaccgcaggcatccgactccctagacagatcctctctccccggcaaactaaacaaaacttagggccaaggaacatacacacccaacagaacccagaccccggcccacggcgccgcgcccccaacccccgacaaccagagggagcccccaaccaatcccgccggctcccccggtgcccacaggcagggacaccaacccccgaacagacccagcacccaaccatcgacaatccaagacgggggggcccccccaaaaaaaggcccccaggggccgacagccagcaccgcgaggaagcccacccaccccacacacgaccacggcaaccaaaccagaacccagaccaccctgggccaccagctcccagactcggccatcaccccgcagaaaggaaaggccacaacccgcgcaccccagccccgatccggcggggagccacccaacccgaaccagcacccaagagcgatccccgaaggacccccgaaccgcaaaggacatcagtatcccacagcctctccaagtcccccggtctcctcctcttctcgaagggaccaaaagatcaatccaccacacccgacgacactcaactccccacccctaaaggagacaccgggaatcccagaatcaagactcatccaatgtccatcatgggtctcaaggtgaacgtctctgccatattcatggcagtactgttaactctccaaacacccaccggtcaaatccattggggcaatctctctaagataggggtggtaggaataggaagtgcaagctacaaagttatgactcgttccagccatcaatcattagtcataaaattaatgcccaatataactctcctcaataactgcacgagggtagagattgcagaatacaggagactactgagaacagttttggaaccaattagagatgcacttaatgcaatgacccagaatataagaccggttcagagtgtagcttcaagtaggagacacaagagatttgcgggagtagtcctggcaggtgcggccctaggcgttgccacagctgctcagataacagccggcattgcacttcaccagtccatgctgaactctcaagccatcgacaatctgagagcgagcctggaaactactaatcaggcaattgagacaatcagacaagcagggcaggagatgatattggctgttcagggtgtccaagactacatcaataatgagctgataccgtctatgaaccaactatcttgtgatttaatcggccagaagctcgggctcaaattgctcagatactatacagaaatcctgtcattatttggccccagtttacgggaccccatatctgcggagatatctatccaggctttgagctatgcgcttggaggagacatcaataaggtgttagaaaagctcggatacagtggaggtgatttactgggcatcttagagagcggaggaataaaggcccggataactcacgtcgacacagagtcctacttcattgtcctcagtatagcctatccgacgctgtccgagattaagggggtgattgtccaccggctagagggggtctcgtacaacataggctctcaagagtggtataccactgtgcccaagtatgttgcaacccaagggtaccttatctcgaattttgatgagtcatcgtgtactttcatgccagaggggactgtgtgcagccaaaatgccttgtacccgatgagtcctctgctccaagaatgcctccgggggtacaccaagtcctgtgctcgtacactcgtatccgggtcttttgggaaccggttcattttatcacaagggaacctaatagccaattgtgcatcaatcctttgcaagtgttacacaacaggaacgatcattaatcaagaccctgacaagatcctaacatacattgctgccgatcactgcccggtagtcgaggtgaacggcgtgaccatccaagtcgggagcaggaggtatccagacgctgtgtacttgcacagaattgacctcggtcctcccatatcattggagaggttggacgtagggacaaatctggggaatgcaattgctaagttggaggatgccaaggaattgttggagtcatcggaccagatattgaggagtatgaaaggtttatcgagcactagcatagtctacatcctgattgcagtgtgtcttggagggttgatagggatccccgctttaatatgttgctgcagggggcgttgtaacaaaaagggagaacaagttggtatgtcaagaccaggcctaaagcctgatcttacgggaacatcaaaatcctatgtaaggtcgctctgatcctctacaactcttgaaacacaaatgtcccacaagtctcctcttcgtcatcaagcaaccaccgcacccagcatcaagcccacctgaaattatctccggcttccctctggccgaacaatatcggtagttaatcaaaacttagggtgcaagatcatccacaatgtcaccacaacgagaccggataaatgccttctacaaagataacccccatcccaagggaagtaggatagtcattaacagagaacatcttatgattgatagaccttatgttttgctggctgttctgtttgtcatgtttctgagcttgatcgggttgctagccattgcaggcattagacttcatcgggcagccatctacaccgcagagatccataaaagcctcagcaccaatctagatgtaactaactcaatcgagcatcaggtcaaggacgtgctgacaccactcttcaaaatcatcggtgatgaagtgggcctgaggacacctcagagattcactgacctagtgaaattaatctctgacaagattaaattccttaatccggatagggagtacgacttcagagatctcacttggtgtatcaacccgccagagagaatcaaattggattatgatcaatactgtgcagatgtggctgctgaagagctcatgaatgcattggtgaactcaactctactggagaccagaacaaccaatcagttcctagctgtctcaaagggaaactgctcagggcccactacaatcagaggtcaattctcaaacatgtcgctgtccctgttagacttgtatttaggtcgaggttacaatgtgtcatctatagtcactatgacatcccagggaatgtatgggggaacttacctagtggaaaagcctaatctgagcagcaaaaggtcagagttgtcacaactgagcatgtaccgagtgtttgaagtaggtgttatcagaaatccgggtttgggggctccggtgttccatatgacaaactatcttgagcaaccagtcagtaatgatctcagcaactgtatggtggctttgggggagctcaaactcgcagccctttgtcacggggaagattctatcacaattccctatcagggatcagggaaaggtgtcagcttccagctcgtcaagctaggtgtctggaaatccccaaccgacatgcaatcctgggtccccttatcaacggatgatccagtgatagacaggctttacctctcatctcacagaggtgttatcgctgacaatcaagcaaaatgggctgtcccgacaacacgaacagatgacaagttgcgaatggagacatgcttccaacaggcgtgtaagggtaaaatccaagcactctgcgagaatcccgagtgggcaccattgaaggataacaggattccttcatacggggtcttgtctgttgatctgagtctgacagttgagcttaaaatcaaaattgcttcgggattcgggccattgatcacacacggttcagggatggacctatacaaatccaaccacaacaatgtgtattggctgactatcccgccaatgaagaacctagccttaggtgtaatcaacacattggagtggataccgagattcaaggttagtccctacctcttcactgtcccaattaaggaagcaggcgaagactgccatgccccaacatacctacctgcggaggtggatggtgatgtcaaactcagttccaatctggtgattctacctggtcaagatctccaatatgttttggcaacctacgatacttccagggttgaacatgctgtggtttattacgtttacagcccaagccgctcattttcttacttttatccttttaggttgcctataaagggggtccccatcgaattacaagtggaatgcttcacatgggaccaaaaactctggtgccgtcacttctgtgtgcttgcggactcagaatctggtggacatatcactcactctgggatggtgggcatgggagtcagctgcacagtcacccgggaagatggaaccaatcgcagatagggctgctagtgaaccaatcacatgatgtcacccagacatcaggcatacccactagtgtgaaatagacatcagaattaagaaaaacgtagggtccaagtggttccccgttatggactcgctatctgtcaaccagatcttataccctgaagttcacctagatagcccgatagttaccaataagatagtagccatcctggagtatgctcgagtccctcacgcttacagcctggaggaccctacactgtgtcagaacatcaagcaccgcctaaaaaacggattttccaaccaaatgattataaacaatgtggaagttgggaatgtcatcaagtccaagcttaggagttatccggcccactctcatattccatatccaaattgtaatcaggatttatttaacatagaagacaaagagtcaacgaggaagatccgtgaactcctcaaaaaggggaattcgctgtactccaaagtcagtgataaggttttccaatgcttaagggacactaactcacggcttggcctaggctccgaattgagggaggacatcaaggagaaagttattaacttgggagtttacatgcacagctcccagtggtttgagccctttctgttttggtttacagtcaagactgagatgaggtcagtgattaaatcacaaacccatacttgccataggaggagacacacacctgtattcttcactggtagttcagttgagttgctaatctctcgtgaccttgttgctataatcagtaaagagtctcaacatgtatattacctgacatttgaactggttttgatgtattgtgatgtcatagaggggaggttaatgacagagaccgctatgactattgatgctaggtatacagagcttctaggaagagtcagatacatgtggaaactgatagatggtttcttccctgcactcgggaatccaacttatcaaattgtagccatgctggagcctctttcacttgcttacctgcagctgagggatataacagtagaactcagaggtgctttccttaaccactgctttactgaaatacatgatgttcttgaccaaaacgggttttctgatgaaggtacttatcatgagttaactgaagctctagattacattttcataactgatgacatacatctgacaggggagattttctcatttttcagaagtttcggccaccccagacttgaagcagtaacggctgctgaaaatgttaggaaatacatgaatcagcctaaagtcattgtgtatgagactctgatgaaaggtcatgccatattttgtggaatcataatcaacggctatcgtgacaggcacggaggcagttggccaccgctgaccctccccctgcatgctgcagacacaatccggaatgctcaagcttcaggtgaagggttaacacatgagcagtgcgttgataactggaaatcttttgctggagtgaaatttggctgctttatgcctcttagcctggatagtgatctgacaatgtacctaaaggacaaggcacttgctgctctccaaagggaatgggattcagtttacccgaaagagttcctgcgttacgaccctcccaagggaaccgggtcacggaggcttgtagatgttttccttaatgattcgagctttgacccatatgatgtgataatgtatgttgtaagtggagcttacctccatgaccctgagttcaacctgtcttacagcctgaaagaaaaggagatcaaggaaacaggtagactttttgctaaaatgacttacaaaatgagggcatgccaagtgattgctgaaaatctaatctcaaacgggattggcaaatattttaaggacaatgggatggccaaggatgagcacgatttgactaaggcactccacactctagctgtctcaggagtccccaaagatctcaaagaaagtcacaggggggggccagtcttaaaaacctactcccgaagcccagtccacacaagtaccaggaacgtgagagcagcaaaagggtttatagggttccctcaagtaattcggcaggaccaagacactgatcatccggagaatatggaagcttacgagacagtcagtgcatttatcacgactgatctcaagaagtactgccttaattggagatatgagaccatcagcttgtttgcacagaggctaaatgagatttacggattgccctcatttttccagtggctgcataagaggcttgagacctctgtcctgtatgtaagtgaccctcattgcccccccgaccttgacgcccatatcccgttatataaagtccccaatgatcaaatcttcattaagtaccctatgggaggtatagaagggtattgtcagaagctgtggaccatcagcaccattccctatctatacctggctgcttatgagagcggagtaaggattgcttcgttagtgcaaggggacaatcagaccatagccgtaacaaaaagggtacccagcacatggccctacaaccttaagaaacgggaagctgctagagtaactagagattactttgtaattcttaggcaaaggctacatgatattggccatcacctcaaggcaaatgagacaattgtttcatcacatttttttgtctattcaaaaggaatatattatgatgggctacttgtgtcccaatcactcaagagcatcgcaagatgtgtattctggtcagagactatagttgatgaaacaagggcagcatgcagtaatattgctacaacaatggctaaaagcatcgagagaggttatgaccgttaccttgcatattccctgaacgtcctaaaagtgatacagcaaattctgatctctcttggcttcacaatcaattcaaccatgacccgggatgtagtcatacccctcctcacaaacaacgacctcttaataaggatggcactgttgcccgctcctattggggggatgaattatctgaatatgagcaggctgtttgtcagaaacatcggtgatccagtaacatcatcaattgctgatctcaagagaatgattctcgcctcactaatgcctgaagagaccctccatcaagtaatgacacaacaaccgggggactcttcattcctagactgggctagcgacccttactcagcaaatcttgtatgtgtccagagcatcactagactcctcaagaacataactgcaaggtttgtcctgatccatagtccaaacccaatgttaaaaggattattccatgatgacagtaaagaagaggacgagggactggcggcattcctcatggacaggcatattatagtacctagggcagctcatgaaatcctggatcatagtgtcacaggggcaagagagtctattgcaggcatgctggataccacaaaaggcttgattcgagccagcatgaggaagggggggttaacctctcgagtgataaccagattgtccaattatgactatgaacaattcagagcagggatggtgctattgacaggaagaaagagaaatgtcctcattgacaaagagtcatgttcagtgcagctggcgagagctctaagaagccatatgtgggcgaggctagctcgaggacggcctatttacggccttgaggtccctgatgtactagaatctatgcgaggccaccttattcggcgtcatgagacatgtgtcatctgcgagtgtggatcagtcaactacggatggttttttgtcccctcgggttgccaactggatgatattgacaaggaaacatcatccttgagagtcccatatattggttctaccactgatgagagaacagacatgaagcttgccttcgtaagagccccaagtcgatccttgcgatctgctgttagaatagcaacagtgtactcatgggcttacggtgatgatgatagctcttggaacgaagcctggttgttggctaggcaaagggccaatgtgagcctggaggagctaagggtgatcactcccatctcaacttcgactaatttagcgcataggttgagggatcgtagcactcaagtgaaatactcaggtacatcccttgtccgagtggcgaggtataccacaatctccaacgacaatctctcatttgtcatatcagataagaaggttgatactaactttatataccaacaaggaatgcttctagggttgggtgttttagaaacattgtttcgactcgagaaagataccggatcatctaacacggtattacatcttcacgtcgaaacagattgttgcgtgatcccgatgatagatcatcccaggatacccagctcccgcaagctagagctgagggcagagctatgtaccaacccattgatatatgataatgcacctttaattgacagagatgcaacaaggctatacacccagagccataggaggcaccttgtggaatttgttacatggtccacaccccaactatatcacattttagctaagtccacagcactatctatgattgacctggtaacaaaatttgagaaggaccatatgaatgaaatttcagctctcataggggatgacgatatcaatagtttcataactgagtttctgctcatagagccaagattattcactatctacttgggccagtgtgcggccatcaattgggcatttgatgtacattatcatagaccatcagggaaatatcagatgggtgagctgttgtcatcgttcctttctagaatgagcaaaggagtgtttaaggtgcttgtcaatgctctaagccacccaaagatctacaagaaattctggcattgtggtattatagagcctatccatggtccttcacttgatgctcaaaacttgcacacaactgtgtgcaacatggtttacacatgctatatgacctacctcgacctgttgttgaatgaagagttagaagagttcacatttctcttgtgtgaaagcgacgaggatgtagtaccggacagattcgacaacatccaggcaaaacacttatgtgttctggcagatttgtactgtcaaccagggacctgcccaccaattcgaggtctaagaccggtagagaaatgtgcagttctaaccgaccatatcaaggcagaggctatgttatctccagcaggatcttcgtggaacataaatccaattattgtagaccattactcatgctctctgacttatctccggcgaggatcgatcaaacagataagattgagagttgatccaggattcattttcgacgccctcgctgaggtaaatgtcagtcagccaaagatcggcagcaacaacatctcaaatatgagcatcaaggctttcagacccccacacgatgatgttgcaaaattgctcaaagatatcaacacaagcaagcacaatcttcccatttcagggggcaatctcgccaattatgaaatccatgctttccgcagaatcgggttgaactcatctgcttgctacaaagctgttgagatatcaacattaattaggagatgccttgagccaggggaggacggcttgttcttgggtgagggatcgggttctatgttgatcacttataaagagatacttaaactaaacaagtgcttctataatagtggggtttccgccaattctagatctggtcaaagggaattagcaccctatccctccgaagttggccttgtcgaacacagaatgggagtaggtaatattgtcaaagtgctctttaacgggaggcccgaagtcacgtgggtaggcagtgtagattgcttcaatttcatagttagtaatatccctacctctagtgtggggtttatccattcagatatagagaccttgcctgacaaagatactatagagaagctagaggaattggcagccatcttatcgatggctctgctcctgggcaaaataggatcaatactggtgattaagcttatgcctttcagcggggattttgttcagggatttataagttatgtagggtctcattatagagaagtgaaccttgtataccctagatacagcaacttcatctctactgaatcttatttggttatgacagatctcaaggctaaccggctaatgaatcctgaaaagattaagcagcagataattgaatcatctgtgaggacttcacctggacttataggtcacatcctatccattaagcaactaagctgcatacaagcaattgtgggagacgcagttagtagaggtgatatcaatcctactctgaaaaaacttacacctatagagcaggtgctgatcaattgcgggttggcaattaacggacctaagctgtgcaaagaattgatccaccatgatgttgcctcagggcaagatggattgcttaattctatactcatcctctacagggagttggcaagattcaaagacaaccaaagaagtcaacaagggatgttccacgcttaccccgtattggtaagtagcaggcaacgagaacttatatctaggatcacccgcaaattctgggggcacattcttctttactccgggaacaaaaagttgataaataagtttatccagaatctcaagtccggctatctgatactagacttacaccagaatatcttcgttaagaatctatccaagtcagagaaacagattattatgacggggggtttgaaacgtgagtgggtttttaaggtaacagtcaaggagaccaaagaatggtataagttagtcggatacagtgccctgattaaggactaattggttgaactccggaaccctaatcctgccctaggtggttaggcattatttgcaatatattaaagaaaactttgaaaatacgaagtttctattcccagctttgtctggt

SEQ ID NO: 60 - DNA, 17454 bp, synthetic construct
  source 1..17454: mol_type = other DNA
accaaacaaagttgggtaaggatagttcaatcaatgatcatcttctagtgcacttaggattcaagatcctattatcagggacaagagcaggattagggatatccgagatggccacacttttaaggagcttagcattgttcaaaagaaacaaggacaaaccacccattacatcaggatccggtggagccatcagaggaatcaaacacattattatagtaccaatccctggagattcctcaattaccactcgatccagacttctggaccggttggtgaggttaattggaaacccggatgtgagcgggcccaaactaacaggggcactaataggtatattatccttatttgtggagtctccaggtcaattgattcagaggatcaccgatgaccctgacgttagcataaggctgttagaggttgtccagagtgaccagtcacaatctggccttaccttcgcatcaagaggtaccaacatggaggatgaggcggaccaatacttttcacatgatgatccaattagtagtgatcaatccaggttcggatggttcgggaacaaggaaatctcagatattgaagtgcaagaccctgagggattcaacatgattctgggtaccatcctagcccaaatttgggtcttgctcgcaaaggcggttacggccccagacacggcagctgattcggagctaagaaggtggataaagtacacccaacaaagaagggtagttggtgaatttagattggagagaaaatggttggatgtggtgaggaacaggattgccgaggacctctccttacgccgattcatggtcgctctaatcctggatatcaagagaacacccggaaacaaacccaggattgctgaaatgatatgtgacattgatacatatatcgtagaggcaggattagccagttttatcctgactattaagtttgggatagaaactatgtatcctgctcttggactgcatgaatttgctggtgagttatccacacttgagtccttgatgaacctttaccagcaaatgggggaaactgcaccctacatggtaatcctggagaactcaattcagaacaagttcagtgcaggatcataccctctgctctggagctatgccatgggagtaggagtggaacttgaaaactccatgggaggtttgaactttggccgatcttactttgatccagcatattttagattagggcaagagatggtaaggaggtcagctggaaaggtcagttccacattggcatctgaactcggtatcactgccgaggatgcaaggcttgtttcagagattgcaatgcatactactgaggacaagatcagtagagcggttggacccagacaagcccaagtatcatttctacacggtgatcaaagtgagaatgagctaccgagattggggggcaaggaagataggagggtcaaacagagtcgaggagaagccagggagagctacagagaaaccgggcccagcagagcaagtgatgcgagagctgcccatcttccaaccggcacacccctagacattgacactgcaacggagtccagccaagatccgcaggacagtcgaaggtcagctgacgccctgcttaggctgcaagccatggcaggaatctcggaagaacaaggctcagacacggacacccctatagtgtacaatgacagaaatcttctagactaggtgcgagaggccgagggccagaacaacatccgcctaccatccatcattgttataaaaaacttaggaaccaggtccacacagccgccagcccatcaaccatccactcccacgattggagccaatggcagaagagcaggcacgccatgtcaaaaacggactggaatgcatccgggctctcaaggccgagcccatcggctcactggccatcgaggaagctatggcagcatggtcagaaatatcagacaacccaggacaggagcgagccacctgcagggaagagaaggcaggcagttcgggtctcagcaaaccatgcctctcagcaattggatcaactgaaggcggtgcacctcgcatccgcggtcagggacctggagagagcgatgacgacgctgaaactttgggaatccccccaagaaatctccaggcatcaagcactgggttacagtgttattacgtttatgatcacagcggtgaagcggttaagggaatccaagatgctgactctatcatggttcaatcaggccttgatggtgatagcaccctctcaggaggagacaatgaatctgaaaacagcgatgtggatattggcgaacctgataccgagggatatgctatcactgaccggggatctgctcccatctctatggggttcagggcttctgatgttgaaactgcagaaggaggggagatccacgagctcctgagactccaatccagaggcaacaactttccgaagcttgggaaaactctcaatgttcctccgcccccggaccccggtagggccagcacttccgggacacccattaaaaagggcacagacgcgagattagcctcatttggaacggagatcgcgtctttattgacaggtggtgcaacccaatgtgctcgaaagtcaccctcggaaccatcagggccaggtgcacctgcggggaatgtccccgagtgtgtgagcaatgccgcactgatacaggagtggacacccgaatctggtaccacaatctccccgagatcccagaataatgaagaagggggagactattatgatgatgagctgttctctgatgtccaagatattaaaacagccttggccaaaatacacgaggataatcagaagataatctccaagctagaatcactgctgttattgaagggagaagttgagtcaattaagaagcagatcaacaggcaaaatatcagcatatccaccctggaaggacacctctcaagcatcatgatcgccattcctggacttgggaaggatcccaacgaccccactgcagatgtcgaaatcaatcccgacttgaaacccatcataggcagagattcaggccgagcactggccgaagttctcaagaaacccgttgccagccgacaactccaaggaatgacaaatggacggaccagttccagaggacagctgctgaaggaatttcagctaaagccgatcgggaaaaagatgagctcagccgtcgggtttgttcctgacaccggccctgcatcacgcagtgtaatccgctccattataaaatccagccggctagaggaggatcggaagcgttacctgatgactctccttgatgatatcaaaggagccaatgatcttgccaagttccaccagatgctgatgaagataataatgaagtagctacagctcaacttacctgccaaccccatgccagtcgacccaactagtacaacctaaatccattataaaaaacttaggagcaaagtgattgcctcccaaggtccacaatgacagagacctacgacttcgacaagtcggcatgggacatcaaagggtcgatcgctccgatacaacccaccacctacagtgatggcaggctggtgccccaggtcagagtcatagatcctggtctaggcgacaggaaggatgaatgctttatgtacatgtttctgctgggggttgttgaggacagcgattccctagggcctccaatcgggcgagcatttgggttcctgcccttaggtgttggcagatccacagcaaagcccgaaaaactcctcaaagaggccactgagcttgacatagttgttagacgtacagcagggctcaatgaaaaactggtgttctacaacaacaccccactaactctcctcacaccttggagaaaggtcctaacaacagggagtgtcttcaacgcaaaccaagtgtgcaatgcggttaatctgataccgctcgataccccgcagaggttccgtgttgtttatatgagcatcacccgtctttcggataacgggtattacaccgttcctagaagaatgctggaattcagatcggtcaatgcagtggccttcaacctgctggtgacccttaggattgacaaggcgataggccctgggaagatcatcgacaatacagagcaacttcctgaggcaacatttatggtccacatcgggaacttcaggagaaagaagagtgaagtctactctgccgattattgcaaaatgaaaatcgaaaagatgggcctggtttttgcacttggtgggatagggggcaccagtcttcacattagaagcacaggcaaaatgagcaagactctccatgcacaactcgggttcaagaagaccttatgttacccgctgatggatatcaatgaagaccttaatcgattactctggaggagcagatgcaagatagtaagaatccaggcagttttgcagccatcagttcctcaagaattccgcatttacgacgacgtgatcataaatgatgaccaaggactattcaaagttctgtagaccgtagtgcccagcaatgcccgaaaacgacccccctcacaatgacagccagaaggcccggacaaaaaagccccctccgaaagactccacggaccaagcgagaggccagccagcagccgacggcaagcgcgaacaccaggcggccccagcacagaacagccctgacacaaggccaccaccagccaccccaatctgcatcctcctcgtgggacccccgaggaccaacccccaaggctgcccccgatccaaaccaccaaccgcatccccaccacccccgggaaagaaacccccagcaattggaaggcccctccccctcttcctcaacacaagaactccacaaccgaaccgcacaagcgaccgaggtgacccaaccgcaggcatccgactccctagacagatcctctctccccggcaaactaaacaaaacttagggccaaggaacatacacacccaacagaacccagaccccggcccacggcgccgcgcccccaacccccgacaaccagagggagcccccaaccaatcccgccggctcccccggtgcccacaggcagggacaccaacccccgaacagacccagcacccaaccatcgacaatccaagacgggggggcccccccaaaaaaaggcccccaggggccgacagccagcaccgcgaggaagcccacccaccccacacacgaccacggcaaccaaaccagaacccagaccaccctgggccaccagctcccagactcggccatcaccccgcagaaaggaaaggccacaacccgcgcaccccagccccgatccggcggggagccacccaacccgaaccagcacccaagagcgatccccgaaggacccccgaaccgcaaaggacatcagtatcccacagcctctccaagtcccccggtctcctcctcttctcgaagggaccaaaagatcaatccaccacacccgacgacactcaactccccacccctaaaggagacaccgggaatcccagaatcaagactcatccaatgtccatcatgggtctcaaggtgaacgtctctgccatattcatggcagtactgttaactctccaaacacccaccggtcaaatccattggggcaatctctctaagataggggtggtaggaataggaagtgcaagctacaaagttatgactcgttccagccatcaatcattagtcataaaattaatgcccaatataactctcctcaataactgcacgagggtagagattgcagaatacaggagactactgagaacagttttggaaccaattagagatgcacttaatgcaatgacccagaatataagaccggttcagagtgtagcttcaagtaggagacacaagagatttgcgggagtagtcctggcaggtgcggccctaggcgttgccacagctgctcagataacagccggcattgcacttcaccagtccatgctgaactctcaagccatcgacaatctgagagcgagcctggaaactactaatcaggcaattgagacaatcagacaagcagggcaggagatgatattggctgttcagggtgtccaagactacatcaataatgagctgataccgtctatgaaccaactatcttgtgatttaatcggccagaagctcgggctcaaattgctcagatactatacagaaatcctgtcattatttggccccagtttacgggaccccatatctgcggagatatctatccaggctttgagctatgcgcttggaggagacatcaataaggtgttagaaaagctcggatacagtggaggtgatttactgggcatcttagagagcggaggaataaaggcccggataactcacgtcgacacagagtcctacttcattgtcctcagtatagcctatccgacgctgtccgagattaagggggtgattgtccaccggctagagggggtctcgtacaacataggctctcaagagtggtataccactgtgcccaagtatgttgcaacccaagggtaccttatctcgaattttgatgagtcatcgtgtactttcatgccagaggggactgtgtgcagccaaaatgccttgtacccgatgagtcctctgctccaagaatgcctccgggggtacaccaagtcctgtgctcgtacactcgtatccgggtcttttgggaaccggttcattttatcacaagggaacctaatagccaattgtgcatcaatcctttgcaagtgttacacaacaggaacgatcattaatcaagaccctgacaagatcctaacatacattgctgccgatcactgcccggtagtcgaggtgaacggcgtgaccatccaagtcgggagcaggaggtatccagacgctgtgtacttgcacagaattgacctcggtcctcccatatcattggagaggttggacgtagggacaaatctggggaatgcaattgctaagttggaggatgccaaggaattgttggagtcatcggaccagatattgaggagtatgaaaggtttatcgagcactagcatagtctacatcctgattgcagtgtgtcttggagggttgatagggatccccgctttaatatgttgctgcagggggcgttgtaacaaaaagggagaacaagttggtatgtcaagaccaggcctaaagcctgatcttacgggaacatcaaaatcctatgtaaggtcgctctgatcctctacaactcttgaaacacaaatgtcccacaagtctcctcttcgtcatcaagcaaccaccgcacccagcatcaagcccacctgaaattatctccggcttccctctggccgaacaatatcggtagttaatcaaaacttagggtgcaagatcatccacaatgtcaccacaacgagaccggataaatgccttctacaaagataacccccatcccaagggaagtaggatagtcattaacagagaacatcttatgattgatagaccttatgttttgctggctgttctgtttgtcatgtttctgagcttgatcgggttgctagccattgcaggcattagacttcatcgggcagccatctacaccgcagagatccataaaagcctcagcaccaatctagatgtaactaactcaatcgagcatcaggtcaaggacgtgctgacaccactcttcaaaatcatcggtgatgaagtgggcctgaggacacctcagagattcactgacctagtgaaattaatctctgacaagattaaattccttaatccggatagggagtacgacttcagagatctcacttggtgtatcaacccgccagagagaatcaaattggattatgatcaatactgtgcagatgtggctgctgaagagctcatgaatgcattggtgaactcaactctactggagaccagaacaaccaatcagttcctagctgtctcaaagggaaactgctcagggcccactacaatcagaggtcaattctcaaacatgtcgctgtccctgttagacttgtatttaggtcgaggttacaatgtgtcatctatagtcactatgacatcccagggaatgtatgggggaacttacctagtggaaaagcctaatctgagcagcaaaaggtcagagttgtcacaactgagcatgtaccgagtgtttgaagtaggtgttatcagaaatccgggtttgggggctccggtgttccatatgacaaactatcttgagcaaccagtcagtaatgatctcagcaactgtatggtggctttgggggagctcaaactcgcagccctttgtcacggggaagattctatcacaattccctatcagggatcagggaaaggtgtcagcttccagctcgtcaagctaggtgtctggaaatccccaaccgacatgcaatcctgggtccccttatcaacggatgatccagtgatagacaggctttacctctcatctcacagaggtgttatcgctgacaatcaagcaaaatgggctgtcccgacaacacgaacagatgacaagttgcgaatggagacatgcttccaacaggcgtgtaagggtaaaatccaagcactctgcgagaatcccgagtgggcaccattgaaggataacaggattccttcatacggggtcttgtctgttgatctgagtctgacagttgagcttaaaatcaaaattgcttcgggattcgggccattgatcacacacggttcagggatggacctatacaaatccaaccacaacaatgtgtattggctgactatcccgccaatgaagaacctagccttaggtgtaatcaacacattggagtggataccgagattcaaggttagtccctacctcttcactgtcccaattaaggaagcaggcgaagactgccatgccccaacatacctacctgcggaggtggatggtgatgtcaaactcagttccaatctggtgattctacctggtcaagatctccaatatgttttggcaacctacgatacttccagggttgaacatgctgtggtttattacgtttacagcccaagccgctcattttcttacttttatccttttaggttgcctataaagggggtccccatcgaattacaagtggaatgcttcacatgggaccaaaaactctggtgccgtcacttctgtgtgcttgcggactcagaatctggtggacatatcactcactctgggatggtgggcatgggagtcagctgcacagtcacccgggaagatggaaccaatcgcagatagggctgctagtgaaccaatcacatgatgtcacccagacatcaggcatacccactagtctaccctccatcattgttataaaaaacttaggaaccaggtccacacagccgccagcccatcaacgcgtacggccaccatggcattgggtagagttggtttggctgtgggactttggggtctcctctgggtcggtgtggttgtcgtactggctaacgcttctccaggccgcactattactgttggaccgagagggaacgcttccaacgctgctccctctgcctcccctaggaacgcttctgctcctagaactacacctactccaccgcaaccccgcaaagcaaccaaaagcaaggcctcaaccgctaaaccagctcctccaccgaagacaggcccacctaaaaccagcagcgagcccgtgcggtgtaatcgacacgatcccctggcccgatacggtagtcgggtgcaaatccgctgtaggtttcctaatagtactagaacagaaagcaggctgcagatctggagatacgccactgccactgacgcagaaatcgggaccgccccttcccttgaggaggtgatggtgaacgtaagcgctccaccaggaggtcagctcgtctacgactcagcacccaataggaccgatccacacgtgatttgggcagaaggagctggaccaggcgcctctccaaggttgtattccgttgtaggcccactgggtcggcagagactgattatcgaagaactgactctggaaacccagggaatgtactattgggtttggggaaggactgataggcctagtgcttacggtacttgggtgagagtcagggtatttcggcctccttccctgactatacacccacacgcagtgctcgagggtcagcctttcaaggccacttgcacagccgcaacttactaccctgggaaccgagcagagtttgtgtggtttgaagacgggcggagagtttttgaccccgcacagatccacacgcagacccaggaaaaccctgacggattctccaccgttagcactgtgacctctgccgcagttggaggacaaggaccgccaaggaccttcacctgtcagctgacctggcaccgcgactctgtttcagcgtctagacggaacgcgagcggtactgcctctgtgctccccagacccacaatcacaatggagttcaccggcgatcacgccgtgtgtacggctggttgtgtacccgaaggcgtgacctttgcttggtttttgggagacgatagctcacctgccgagaaagtcgcagtggcttcacaaacttcctgcggaaggcccgggactgccactatccgatctacgctccccgtgtcttacgagcagacagaatatatttgccgactggcaggatatccagacggaatacccgtcctggaacaccacggttctcaccagcctccaccgagagatccaaccgagcgacaggtaatcagagccgtggaaggagcgggtattggcgtggcagttctcgttgctgtcgtacttgccggcacggctgttgtgtatctcactcacgccagcagcgtgcgatacaggcgcctcagatgataagcgcgcagcgcttagacgtctcgcgatcgatgctagtgtgaaatagacatcagaattaagaaaaacgtagggtccaagtggttccccgttatggactcgctatctgtcaaccagatcttataccctgaagttcacctagatagcccgatagttaccaataagatagtagccatcctggagtatgctcgagtccctcacgcttacagcctggaggaccctacactgtgtcagaacatcaagcaccgcctaaaaaacggattttccaaccaaatgattataaacaatgtggaagttgggaatgtcatcaagtccaagcttaggagttatccggcccactctcatattccatatccaaattgtaatcaggatttatttaacatagaagacaaagagtcaacgaggaagatccgtgaactcctcaaaaaggggaattcgctgtactccaaagtcagtgataaggttttccaatgcttaagggacactaactcacggcttggcctaggctccgaattgagggaggacatcaaggagaaagttattaacttgggagtttacatgcacagctcccagtggtttgagccctttctgttttggtttacagtcaagactgagatgaggtcagtgattaaatcacaaacccatacttgccataggaggagacacacacctgtattcttcactggtagttcagttgagttgctaatctctcgtgaccttgttgctataatcagtaaagagtctcaacatgtatattacctgacatttgaactggttttgatgtattgtgatgtcatagaggggaggttaatgacagagaccgctatgactattgatgctaggtatacagagcttctaggaagagtcagatacatgtggaaactgatagatggtttcttccctgcactcgggaatccaacttatcaaattgtagccatgctggagcctctttcacttgcttacctgcagctgagggatataacagtagaactcagaggtgctttccttaaccactgctttactgaaatacatgatgttcttgaccaaaacgggttttctgatgaaggtacttatcatgagttaactgaagctctagattacattttcataactgatgacatacatctgacaggggagattttctcatttttcagaagtttcggccaccccagacttgaagcagtaacggctgctgaaaatgttaggaaatacatgaatcagcctaaagtcattgtgtatgagactctgatgaaaggtcatgccatattttgtggaatcataatcaacggctatcgtgacaggcacggaggcagttggccaccgctgaccctccccctgcatgctgcagacacaatccggaatgctcaagcttcaggtgaagggttaacacatgagcagtgcgttgataactggaaatcttttgctggagtgaaatttggctgctttatgcctcttagcctggatagtgatctgacaatgtacctaaaggacaaggcacttgctgctctccaaagggaatgggattcagtttacccgaaagagttcctgcgttacgaccctcccaagggaaccgggtcacggaggcttgtagatgttttccttaatgattcgagctttgacccatatgatgtgataatgtatgttgtaagtggagcttacctccatgaccctgagttcaacctgtcttacagcctgaaagaaaaggagatcaaggaaacaggtagactttttgctaaaatgacttacaaaatgagggcatgccaagtgattgctgaaaatctaatctcaaacgggattggcaaatattttaaggacaatgggatggccaaggatgagcacgatttgactaaggcactccacactctagctgtctcaggagtccccaaagatctcaaagaaagtcacaggggggggccagtcttaaaaacctactcccgaagcccagtccacacaagtaccaggaacgtgagagcagcaaaagggtttatagggttccctcaagtaattcggcaggaccaagacactgatcatccggagaatatggaagcttacgagacagtcagtgcatttatcacgactgatctcaagaagtactgccttaattggagatatgagaccatcagcttgtttgcacagaggctaaatgagatttacggattgccctcatttttccagtggctgcataagaggcttgagacctctgtcctgtatgtaagtgaccctcattgcccccccgaccttgacgcccatatcccgttatataaagtccccaatgatcaaatcttcattaagtaccctatgggaggtatagaagggtattgtcagaagctgtggaccatcagcaccattccctatctatacctggctgcttatgagagcggagtaaggattgcttcgttagtgcaaggggacaatcagaccatagccgtaacaaaaagggtacccagcacatggccctacaaccttaagaaacgggaagctgctagagtaactagagattactttgtaattcttaggcaaaggctacatgatattggccatcacctcaaggcaaatgagacaattgtttcatcacatttttttgtctattcaaaaggaatatattatgatgggctacttgtgtcccaatcactcaagagcatcgcaagatgtgtattctggtcagagactatagttgatgaaacaagggcagcatgcagtaatattgctacaacaatggctaaaagcatcgagagaggttatgaccgttaccttgcatattccctgaacgtcctaaaagtgatacagcaaattctgatctctcttggcttcacaatcaattcaaccatgacccgggatgtagtcatacccctcctcacaaacaacgacctcttaataaggatggcactgttgcccgctcctattggggggatgaattatctgaatatgagcaggctgtttgtcagaaacatcggtgatccagtaacatcatcaattgctgatctcaagagaatgattctcgcctcactaatgcctgaagagaccctccatcaagtaatgacacaacaaccgggggactcttcattcctagactgggctagcgacccttactcagcaaatcttgtatgtgtccagagcatcactagactcctcaagaacataactgcaaggtttgtcctgatccatagtccaaacccaatgttaaaaggattattccatgatgacagtaaagaagaggacgagggactggcggcattcctcatggacaggcatattatagtacctagggcagctcatgaaatcctggatcatagtgtcacaggggcaagagagtctattgcaggcatgctggataccacaaaaggcttgattcgagccagcatgaggaagggggggttaacctctcgagtgataaccagattgtccaattatgactatgaacaattcagagcagggatggtgctattgacaggaagaaagagaaatgtcctcattgacaaagagtcatgttcagtgcagctggcgagagctctaagaagccatatgtgggcgaggctagctcgaggacggcctatttacggccttgaggtccctgatgtactagaatctatgcgaggccaccttattcggcgtcatgagacatgtgtcatctgcgagtgtggatcagtcaactacggatggttttttgtcccctcgggttgccaactggatgatattgacaaggaaacatcatccttgagagtcccatatattggttctaccactgatgagagaacagacatgaagcttgccttcgtaagagccccaagtcgatccttgcgatctgctgttagaatagcaacagtgtactcatgggcttacggtgatgatgatagctcttggaacgaagcctggttgttggctaggcaaagggccaatgtgagcctggaggagctaagggtgatcactcccatctcaacttcgactaatttagcgcataggttgagggatcgtagcactcaagtgaaatactcaggtacatcccttgtccgagtggcgaggtataccacaatctccaacgacaatctctcatttgtcatatcagataagaaggttgatactaactttatataccaacaaggaatgcttctagggttgggtgttttagaaacattgtttcgactcgagaaagataccggatcatctaacacggtattacatcttcacgtcgaaacagattgttgcgtgatcccgatgatagatcatcccaggatacccagctcccgcaagctagagctgagggcagagctatgtaccaacccattgatatatgataatgcacctttaattgacagagatgcaacaaggctatacacccagagccataggaggcaccttgtggaatttgttacatggtccacaccccaactatatcacattttagctaagtccacagcactatctatgattgacctggtaacaaaatttgagaaggaccatatgaatgaaatttcagctctcataggggatgacgatatcaatagtttcataactgagtttctgctcatagagccaagattattcactatctacttgggccagtgtgcggccatcaattgggcatttgatgtacattatcatagaccatcagggaaatatcagatgggtgagctgttgtcatcgttcctttctagaatgagcaaaggagtgtttaaggtgcttgtcaatgctctaagccacccaaagatctacaagaaattctggcattgtggtattatagagcctatccatggtccttcacttgatgctcaaaacttgcacacaactgtgtgcaacatggtttacacatgctatatgacctacctcgacctgttgttgaatgaagagttagaagagttcacatttctcttgtgtgaaagcgacgaggatgtagtaccggacagattcgacaacatccaggcaaaacacttatgtgttctggcagatttgtactgtcaaccagggacctgcccaccaattcgaggtctaagaccggtagagaaatgtgcagttctaaccgaccatatcaaggcagaggctatgttatctccagcaggatcttcgtggaacataaatccaattattgtagaccattactcatgctctctgacttatctccggcgaggatcgatcaaacagataagattgagagttgatccaggattcattttcgacgccctcgctgaggtaaatgtcagtcagccaaagatcggcagcaacaacatctcaaatatgagcatcaaggctttcagacccccacacgatgatgttgcaaaattgctcaaagatatcaacacaagcaagcacaatcttcccatttcagggggcaatctcgccaattatgaaatccatgctttccgcagaatcgggttgaactcatctgcttgctacaaagctgttgagatatcaacattaattaggagatgccttgagccaggggaggacggcttgttcttgggtgagggatcgggttctatgttgatcacttataaagagatacttaaactaaacaagtgcttctataatagtggggtttccgccaattctagatctggtcaaagggaattagcaccctatccctccgaagttggccttgtcgaacacagaatgggagtaggtaatattgtcaaagtgctctttaacgggaggcccgaagtcacgtgggtaggcagtgtagattgcttcaatttcatagttagtaatatccctacctctagtgtggggtttatccattcagatatagagaccttgcctgacaaagatactatagagaagctagaggaattggcagccatcttatcgatggctctgctcctgggcaaaataggatcaatactggtgattaagcttatgcctttcagcggggattttgttcagggatttataagttatgtagggtctcattatagagaagtgaaccttgtataccctagatacagcaacttcatctctactgaatcttatttggttatgacagatctcaaggctaaccggctaatgaatcctgaaaagattaagcagcagataattgaatcatctgtgaggacttcacctggacttataggtcacatcctatccattaagcaactaagctgcatacaagcaattgtgggagacgcagttagtagaggtgatatcaatcctactctgaaaaaacttacacctatagagcaggtgctgatcaattgcgggttggcaattaacggacctaagctgtgcaaagaattgatccaccatgatgttgcctcagggcaagatggattgcttaattctatactcatcctctacagggagttggcaagattcaaagacaaccaaagaagtcaacaagggatgttccacgcttaccccgtattggtaagtagcaggcaacgagaacttatatctaggatcacccgcaaattctgggggcacattcttctttactccgggaacaaaaagttgataaataagtttatccagaatctcaagtccggctatctgatactagacttacaccagaatatcttcgttaagaatctatccaagtcagagaaacagattattatgacggggggtttgaaacgtgagtgggtttttaaggtaacagtcaaggagaccaaagaatggtataagttagtcggatacagtgccctgattaaggactaattggttgaactccggaaccctaatcctgccctaggtggttaggcattatttgcaatatattaaagaaaactttgaaaatacgaagtttctattcccagctttgtctggt

SEQ ID NO: 61 - DNA, 18714 bp, synthetic construct
  source 1..18714: mol_type = other DNA
accaaacaaagttgggtaaggatagttcaatcaatgatcatcttctagtgcacttaggattcaagatcctattatcagggacaagagcaggattagggatatccgagatggccacacttttaaggagcttagcattgttcaaaagaaacaaggacaaaccacccattacatcaggatccggtggagccatcagaggaatcaaacacattattatagtaccaatccctggagattcctcaattaccactcgatccagacttctggaccggttggtgaggttaattggaaacccggatgtgagcgggcccaaactaacaggggcactaataggtatattatccttatttgtggagtctccaggtcaattgattcagaggatcaccgatgaccctgacgttagcataaggctgttagaggttgtccagagtgaccagtcacaatctggccttaccttcgcatcaagaggtaccaacatggaggatgaggcggaccaatacttttcacatgatgatccaattagtagtgatcaatccaggttcggatggttcgggaacaaggaaatctcagatattgaagtgcaagaccctgagggattcaacatgattctgggtaccatcctagcccaaatttgggtcttgctcgcaaaggcggttacggccccagacacggcagctgattcggagctaagaaggtggataaagtacacccaacaaagaagggtagttggtgaatttagattggagagaaaatggttggatgtggtgaggaacaggattgccgaggacctctccttacgccgattcatggtcgctctaatcctggatatcaagagaacacccggaaacaaacccaggattgctgaaatgatatgtgacattgatacatatatcgtagaggcaggattagccagttttatcctgactattaagtttgggatagaaactatgtatcctgctcttggactgcatgaatttgctggtgagttatccacacttgagtccttgatgaacctttaccagcaaatgggggaaactgcaccctacatggtaatcctggagaactcaattcagaacaagttcagtgcaggatcataccctctgctctggagctatgccatgggagtaggagtggaacttgaaaactccatgggaggtttgaactttggccgatcttactttgatccagcatattttagattagggcaagagatggtaaggaggtcagctggaaaggtcagttccacattggcatctgaactcggtatcactgccgaggatgcaaggcttgtttcagagattgcaatgcatactactgaggacaagatcagtagagcggttggacccagacaagcccaagtatcatttctacacggtgatcaaagtgagaatgagctaccgagattggggggcaaggaagataggagggtcaaacagagtcgaggagaagccagggagagctacagagaaaccgggcccagcagagcaagtgatgcgagagctgcccatcttccaaccggcacacccctagacattgacactgcaacggagtccagccaagatccgcaggacagtcgaaggtcagctgacgccctgcttaggctgcaagccatggcaggaatctcggaagaacaaggctcagacacggacacccctatagtgtacaatgacagaaatcttctagactaggtgcgagaggccgagggccagaacaacatccgcctaccatccatcattgttataaaaaacttaggaaccaggtccacacagccgccagcccatcaaccatccactcccacgattggagccaatggcagaagagcaggcacgccatgtcaaaaacggactggaatgcatccgggctctcaaggccgagcccatcggctcactggccatcgaggaagctatggcagcatggtcagaaatatcagacaacccaggacaggagcgagccacctgcagggaagagaaggcaggcagttcgggtctcagcaaaccatgcctctcagcaattggatcaactgaaggcggtgcacctcgcatccgcggtcagggacctggagagagcgatgacgacgctgaaactttgggaatccccccaagaaatctccaggcatcaagcactgggttacagtgttattacgtttatgatcacagcggtgaagcggttaagggaatccaagatgctgactctatcatggttcaatcaggccttgatggtgatagcaccctctcaggaggagacaatgaatctgaaaacagcgatgtggatattggcgaacctgataccgagggatatgctatcactgaccggggatctgctcccatctctatggggttcagggcttctgatgttgaaactgcagaaggaggggagatccacgagctcctgagactccaatccagaggcaacaactttccgaagcttgggaaaactctcaatgttcctccgcccccggaccccggtagggccagcacttccgggacacccattaaaaagggcacagacgcgagattagcctcatttggaacggagatcgcgtctttattgacaggtggtgcaacccaatgtgctcgaaagtcaccctcggaaccatcagggccaggtgcacctgcggggaatgtccccgagtgtgtgagcaatgccgcactgatacaggagtggacacccgaatctggtaccacaatctccccgagatcccagaataatgaagaagggggagactattatgatgatgagctgttctctgatgtccaagatattaaaacagccttggccaaaatacacgaggataatcagaagataatctccaagctagaatcactgctgttattgaagggagaagttgagtcaattaagaagcagatcaacaggcaaaatatcagcatatccaccctggaaggacacctctcaagcatcatgatcgccattcctggacttgggaaggatcccaacgaccccactgcagatgtcgaaatcaatcccgacttgaaacccatcataggcagagattcaggccgagcactggccgaagttctcaagaaacccgttgccagccgacaactccaaggaatgacaaatggacggaccagttccagaggacagctgctgaaggaatttcagctaaagccgatcgggaaaaagatgagctcagccgtcgggtttgttcctgacaccggccctgcatcacgcagtgtaatccgctccattataaaatccagccggctagaggaggatcggaagcgttacctgatgactctccttgatgatatcaaaggagccaatgatcttgccaagttccaccagatgctgatgaagataataatgaagtagctacagctcaacttacctgccaaccccatgccagtcgacccaactagtacaacctaaatccattataaaaaacttaggagcaaagtgattgcctcccaaggtccacaatgacagagacctacgacttcgacaagtcggcatgggacatcaaagggtcgatcgctccgatacaacccaccacctacagtgatggcaggctggtgccccaggtcagagtcatagatcctggtctaggcgacaggaaggatgaatgctttatgtacatgtttctgctgggggttgttgaggacagcgattccctagggcctccaatcgggcgagcatttgggttcctgcccttaggtgttggcagatccacagcaaagcccgaaaaactcctcaaagaggccactgagcttgacatagttgttagacgtacagcagggctcaatgaaaaactggtgttctacaacaacaccccactaactctcctcacaccttggagaaaggtcctaacaacagggagtgtcttcaacgcaaaccaagtgtgcaatgcggttaatctgataccgctcgataccccgcagaggttccgtgttgtttatatgagcatcacccgtctttcggataacgggtattacaccgttcctagaagaatgctggaattcagatcggtcaatgcagtggccttcaacctgctggtgacccttaggattgacaaggcgataggccctgggaagatcatcgacaatacagagcaacttcctgaggcaacatttatggtccacatcgggaacttcaggagaaagaagagtgaagtctactctgccgattattgcaaaatgaaaatcgaaaagatgggcctggtttttgcacttggtgggatagggggcaccagtcttcacattagaagcacaggcaaaatgagcaagactctccatgcacaactcgggttcaagaagaccttatgttacccgctgatggatatcaatgaagaccttaatcgattactctggaggagcagatgcaagatagtaagaatccaggcagttttgcagccatcagttcctcaagaattccgcatttacgacgacgtgatcataaatgatgaccaaggactattcaaagttctgtagaccgtagtgcccagcaatgcccgaaaacgacccccctcacaatgacagccagaaggcccggacaaaaaagccccctccgaaagactccacggaccaagcgagaggccagccagcagccgacggcaagcgcgaacaccaggcggccccagcacagaacagccctgacacaaggccaccaccagccaccccaatctgcatcctcctcgtgggacccccgaggaccaacccccaaggctgcccccgatccaaaccaccaaccgcatccccaccacccccgggaaagaaacccccagcaattggaaggcccctccccctcttcctcaacacaagaactccacaaccgaaccgcacaagcgaccgaggtgacccaaccgcaggcatccgactccctagacagatcctctctccccggcaaactaaacaaaacttagggccaaggaacatacacacccaacagaacccagaccccggcccacggcgccgcgcccccaacccccgacaaccagagggagcccccaaccaatcccgccggctcccccggtgcccacaggcagggacaccaacccccgaacagacccagcacccaaccatcgacaatccaagacgggggggcccccccaaaaaaaggcccccaggggccgacagccagcaccgcgaggaagcccacccaccccacacacgaccacggcaaccaaaccagaacccagaccaccctgggccaccagctcccagactcggccatcaccccgcagaaaggaaaggccacaacccgcgcaccccagccccgatccggcggggagccacccaacccgaaccagcacccaagagcgatccccgaaggacccccgaaccgcaaaggacatcagtatcccacagcctctccaagtcccccggtctcctcctcttctcgaagggaccaaaagatcaatccaccacacccgacgacactcaactccccacccctaaaggagacaccgggaatcccagaatcaagactcatccaatgtccatcatgggtctcaaggtgaacgtctctgccatattcatggcagtactgttaactctccaaacacccaccggtcaaatccattggggcaatctctctaagataggggtggtaggaataggaagtgcaagctacaaagttatgactcgttccagccatcaatcattagtcataaaattaatgcccaatataactctcctcaataactgcacgagggtagagattgcagaatacaggagactactgagaacagttttggaaccaattagagatgcacttaatgcaatgacccagaatataagaccggttcagagtgtagcttcaagtaggagacacaagagatttgcgggagtagtcctggcaggtgcggccctaggcgttgccacagctgctcagataacagccggcattgcacttcaccagtccatgctgaactctcaagccatcgacaatctgagagcgagcctggaaactactaatcaggcaattgagacaatcagacaagcagggcaggagatgatattggctgttcagggtgtccaagactacatcaataatgagctgataccgtctatgaaccaactatcttgtgatttaatcggccagaagctcgggctcaaattgctcagatactatacagaaatcctgtcattatttggccccagtttacgggaccccatatctgcggagatatctatccaggctttgagctatgcgcttggaggagacatcaataaggtgttagaaaagctcggatacagtggaggtgatttactgggcatcttagagagcggaggaataaaggcccggataactcacgtcgacacagagtcctacttcattgtcctcagtatagcctatccgacgctgtccgagattaagggggtgattgtccaccggctagagggggtctcgtacaacataggctctcaagagtggtataccactgtgcccaagtatgttgcaacccaagggtaccttatctcgaattttgatgagtcatcgtgtactttcatgccagaggggactgtgtgcagccaaaatgccttgtacccgatgagtcctctgctccaagaatgcctccgggggtacaccaagtcctgtgctcgtacactcgtatccgggtcttttgggaaccggttcattttatcacaagggaacctaatagccaattgtgcatcaatcctttgcaagtgttacacaacaggaacgatcattaatcaagaccctgacaagatcctaacatacattgctgccgatcactgcccggtagtcgaggtgaacggcgtgaccatccaagtcgggagcaggaggtatccagacgctgtgtacttgcacagaattgacctcggtcctcccatatcattggagaggttggacgtagggacaaatctggggaatgcaattgctaagttggaggatgccaaggaattgttggagtcatcggaccagatattgaggagtatgaaaggtttatcgagcactagcatagtctacatcctgattgcagtgtgtcttggagggttgatagggatccccgctttaatatgttgctgcagggggcgttgtaacaaaaagggagaacaagttggtatgtcaagaccaggcctaaagcctgatcttacgggaacatcaaaatcctatgtaaggtcgctctgatcctctacaactcttgaaacacaaatgtcccacaagtctcctcttcgtcatcaagcaaccaccgcacccagcatcaagcccacctgaaattatctccggcttccctctggccgaacaatatcggtagttaatcaaaacttagggtgcaagatcatccacaatgtcaccacaacgagaccggataaatgccttctacaaagataacccccatcccaagggaagtaggatagtcattaacagagaacatcttatgattgatagaccttatgttttgctggctgttctgtttgtcatgtttctgagcttgatcgggttgctagccattgcaggcattagacttcatcgggcagccatctacaccgcagagatccataaaagcctcagcaccaatctagatgtaactaactcaatcgagcatcaggtcaaggacgtgctgacaccactcttcaaaatcatcggtgatgaagtgggcctgaggacacctcagagattcactgacctagtgaaattaatctctgacaagattaaattccttaatccggatagggagtacgacttcagagatctcacttggtgtatcaacccgccagagagaatcaaattggattatgatcaatactgtgcagatgtggctgctgaagagctcatgaatgcattggtgaactcaactctactggagaccagaacaaccaatcagttcctagctgtctcaaagggaaactgctcagggcccactacaatcagaggtcaattctcaaacatgtcgctgtccctgttagacttgtatttaggtcgaggttacaatgtgtcatctatagtcactatgacatcccagggaatgtatgggggaacttacctagtggaaaagcctaatctgagcagcaaaaggtcagagttgtcacaactgagcatgtaccgagtgtttgaagtaggtgttatcagaaatccgggtttgggggctccggtgttccatatgacaaactatcttgagcaaccagtcagtaatgatctcagcaactgtatggtggctttgggggagctcaaactcgcagccctttgtcacggggaagattctatcacaattccctatcagggatcagggaaaggtgtcagcttccagctcgtcaagctaggtgtctggaaatccccaaccgacatgcaatcctgggtccccttatcaacggatgatccagtgatagacaggctttacctctcatctcacagaggtgttatcgctgacaatcaagcaaaatgggctgtcccgacaacacgaacagatgacaagttgcgaatggagacatgcttccaacaggcgtgtaagggtaaaatccaagcactctgcgagaatcccgagtgggcaccattgaaggataacaggattccttcatacggggtcttgtctgttgatctgagtctgacagttgagcttaaaatcaaaattgcttcgggattcgggccattgatcacacacggttcagggatggacctatacaaatccaaccacaacaatgtgtattggctgactatcccgccaatgaagaacctagccttaggtgtaatcaacacattggagtggataccgagattcaaggttagtccctacctcttcactgtcccaattaaggaagcaggcgaagactgccatgccccaacatacctacctgcggaggtggatggtgatgtcaaactcagttccaatctggtgattctacctggtcaagatctccaatatgttttggcaacctacgatacttccagggttgaacatgctgtggtttattacgtttacagcccaagccgctcattttcttacttttatccttttaggttgcctataaagggggtccccatcgaattacaagtggaatgcttcacatgggaccaaaaactctggtgccgtcacttctgtgtgcttgcggactcagaatctggtggacatatcactcactctgggatggtgggcatgggagtcagctgcacagtcacccgggaagatggaaccaatcgcagatagggctgctagtgaaccaatcacatgatgtcacccagacatcaggcatacccactagtctaccctccatcattgttataaaaaacttaggaaccaggtccacacagccgccagcccatcaacgcgtacggccaccatgagaggcggaggccttgtttgtgctttggtggttggtgcacttgtggccgcagtagcttcagctgctccagccgcacctagagcttctggtggagttgctgctactgttgcagctaacggcggacctgcctcacaaccaccccctgttccctcccctgcaactaccaaagcccggaagaggaagactaaaaagccacctaagagaccagaggccacaccaccacctgacgctaacgcaaccgttgcagctgggcacgcgaccttgagggctcacctgcgagagataaaagtcgaaaacgccgacgctcagttctacgtctgccctccacctaccggagcaactgtagttcaatttgaacagccacggaggtgcccgacaagaccagaaggacagaattacaccgaaggaatagccgtggtctttaaagagaatatcgccccttacaagttcaaggctacaatgtactacaaggacgtgaccgtctcacaggtgtggtttgggcacagatattcacagtttatgggaatcttcgaagatagagccccggtgcccttcgaagaggtgatcgataagataaacgctaagggcgtgtgcagatccaccgccaagtatgtgcgaaacaatatggaaactaccgctttccaccgagacgatcacgagaccgatatggagctgaagcctgccaaagtagccacgcgaacctcccgcggctggcacactaccgatctgaagtataaccctagccgcgttgaagcgttccacaggtacggtaccacagtaaactgtatcgtggaggaagttgacgctcgcagcgtgtacccctacgacgaattcgtgctggccaccggcgatttcgtatatatgtcacctttctacggatatcgcgagggcagccacacggaacacacctcttacgctgccgatcggttcaagcaagtcgacggtttttacgctagagacctgaccaccaaggcacgggcaacctcccctacaactaggaaccttcttactaccccaaaatttaccgtagcttgggactgggtgcctaagaggccagcagtctgcactatgactaagtggcaagaagtggacgaaatgctgagagctgagtacggcgggagttttaggttctcttccgacgctatttccaccacctttaccactaatctgactcaatatagtctgtctcgagtggacctgggcgattgtattggtcgagacgcacgcgaagctattgaccgaatgtttgcccgcaaatacaacgctacccacataaaggtaggccagcctcagtattacctggctactggaggctttctgattgcttaccagcccttgcttagtaatacccttgccgagctctacgttagagagtatatgcgcgagcaggatcgcaaacctcggaacgctacacctgcaccccttcgcgaagctccctctgcaaacgcctccgtagaacggatcaagaccacctcctctatcgagtttgcccggctccagtttacctacaatcacatccagcgacacgtgaacgatatgctcggaaggatcgcagtcgcgtggtgtgaactgcagaaccacgagctgactctgtggaacgaagcccggaaactgaatcctaacgctatcgcttctgccaccgtagggcgaagggtttctgctaggatgctcggtgacgtgatggccgtctccacttgtgttcctgtagctcccgacaacgtgatcgtgcagaattctatgcgagtaagcagtaggccaggtacctgctattcccgacctctggttagcttccggtacgaggaccaggggcctctgatcgaaggacagctcggagagaacaatgaattgagactgaccagagacgcactggagccgtgtactgtcggccacaggcgatattttatctttggaggggggtacgtctatttcgaggagtatgcctactcccaccaattgagcagggctgacgttacaacagtttccacgtttgctgacttgaatatcacgatgctcgaagacgcagaggcagtgcctctcgaggtttacacacgacacgagattaaagatagcgggctgctggactatactgaagtgcagagacgcaaccagctccacgacttgaggtttgctgatattgacaccgtgatcagggctgacgccaacgctgctatgttcgctggcttgtgtgctttcttcgagggaatgggtgacctgggcagagccgtgggtaaggtcgtaatgggcgtcgtgggcggagtagtaagtgccgtctccggagtatcaagctttatgtcaaaccccttcggcgctctggcggttggtcttctcgttttggcaggtcttgtagccgccttcttcgctttccgctatgtgctgcagctccaacggaatcctatgaaagctctgtaccccctgacaactaaggagctgaaaacttccgatcctggtggtgtaggcggtgaaggtgaagaaggagcagagggggggggctttgatgaagccaagctcgccgaagcacgcgaaatgattagatatatggccctggtgtctgctatggagagaacagaacacaaagctagaaagaaaggcacctctgccctgctctcttctaaggtcacaaatatggtgctcaggaagcggaataaggctagatattctccactgcacaatgaagacgaggccggagacgaagacgagttgtgagcgcgcagcgcttagacgtctcgcgatcgatgctagtgtgaaatagacatcagaattaagaaaaacgtagggtccaagtggttccccgttatggactcgctatctgtcaaccagatcttataccctgaagttcacctagatagcccgatagttaccaataagatagtagccatcctggagtatgctcgagtccctcacgcttacagcctggaggaccctacactgtgtcagaacatcaagcaccgcctaaaaaacggattttccaaccaaatgattataaacaatgtggaagttgggaatgtcatcaagtccaagcttaggagttatccggcccactctcatattccatatccaaattgtaatcaggatttatttaacatagaagacaaagagtcaacgaggaagatccgtgaactcctcaaaaaggggaattcgctgtactccaaagtcagtgataaggttttccaatgcttaagggacactaactcacggcttggcctaggctccgaattgagggaggacatcaaggagaaagttattaacttgggagtttacatgcacagctcccagtggtttgagccctttctgttttggtttacagtcaagactgagatgaggtcagtgattaaatcacaaacccatacttgccataggaggagacacacacctgtattcttcactggtagttcagttgagttgctaatctctcgtgaccttgttgctataatcagtaaagagtctcaacatgtatattacctgacatttgaactggttttgatgtattgtgatgtcatagaggggaggttaatgacagagaccgctatgactattgatgctaggtatacagagcttctaggaagagtcagatacatgtggaaactgatagatggtttcttccctgcactcgggaatccaacttatcaaattgtagccatgctggagcctctttcacttgcttacctgcagctgagggatataacagtagaactcagaggtgctttccttaaccactgctttactgaaatacatgatgttcttgaccaaaacgggttttctgatgaaggtacttatcatgagttaactgaagctctagattacattttcataactgatgacatacatctgacaggggagattttctcatttttcagaagtttcggccaccccagacttgaagcagtaacggctgctgaaaatgttaggaaatacatgaatcagcctaaagtcattgtgtatgagactctgatgaaaggtcatgccatattttgtggaatcataatcaacggctatcgtgacaggcacggaggcagttggccaccgctgaccctccccctgcatgctgcagacacaatccggaatgctcaagcttcaggtgaagggttaacacatgagcagtgcgttgataactggaaatcttttgctggagtgaaatttggctgctttatgcctcttagcctggatagtgatctgacaatgtacctaaaggacaaggcacttgctgctctccaaagggaatgggattcagtttacccgaaagagttcctgcgttacgaccctcccaagggaaccgggtcacggaggcttgtagatgttttccttaatgattcgagctttgacccatatgatgtgataatgtatgttgtaagtggagcttacctccatgaccctgagttcaacctgtcttacagcctgaaagaaaaggagatcaaggaaacaggtagactttttgctaaaatgacttacaaaatgagggcatgccaagtgattgctgaaaatctaatctcaaacgggattggcaaatattttaaggacaatgggatggccaaggatgagcacgatttgactaaggcactccacactctagctgtctcaggagtccccaaagatctcaaagaaagtcacaggggggggccagtcttaaaaacctactcccgaagcccagtccacacaagtaccaggaacgtgagagcagcaaaagggtttatagggttccctcaagtaattcggcaggaccaagacactgatcatccggagaatatggaagcttacgagacagtcagtgcatttatcacgactgatctcaagaagtactgccttaattggagatatgagaccatcagcttgtttgcacagaggctaaatgagatttacggattgccctcatttttccagtggctgcataagaggcttgagacctctgtcctgtatgtaagtgaccctcattgcccccccgaccttgacgcccatatcccgttatataaagtccccaatgatcaaatcttcattaagtaccctatgggaggtatagaagggtattgtcagaagctgtggaccatcagcaccattccctatctatacctggctgcttatgagagcggagtaaggattgcttcgttagtgcaaggggacaatcagaccatagccgtaacaaaaagggtacccagcacatggccctacaaccttaagaaacgggaagctgctagagtaactagagattactttgtaattcttaggcaaaggctacatgatattggccatcacctcaaggcaaatgagacaattgtttcatcacatttttttgtctattcaaaaggaatatattatgatgggctacttgtgtcccaatcactcaagagcatcgcaagatgtgtattctggtcagagactatagttgatgaaacaagggcagcatgcagtaatattgctacaacaatggctaaaagcatcgagagaggttatgaccgttaccttgcatattccctgaacgtcctaaaagtgatacagcaaattctgatctctcttggcttcacaatcaattcaaccatgacccgggatgtagtcatacccctcctcacaaacaacgacctcttaataaggatggcactgttgcccgctcctattggggggatgaattatctgaatatgagcaggctgtttgtcagaaacatcggtgatccagtaacatcatcaattgctgatctcaagagaatgattctcgcctcactaatgcctgaagagaccctccatcaagtaatgacacaacaaccgggggactcttcattcctagactgggctagcgacccttactcagcaaatcttgtatgtgtccagagcatcactagactcctcaagaacataactgcaaggtttgtcctgatccatagtccaaacccaatgttaaaaggattattccatgatgacagtaaagaagaggacgagggactggcggcattcctcatggacaggcatattatagtacctagggcagctcatgaaatcctggatcatagtgtcacaggggcaagagagtctattgcaggcatgctggataccacaaaaggcttgattcgagccagcatgaggaagggggggttaacctctcgagtgataaccagattgtccaattatgactatgaacaattcagagcagggatggtgctattgacaggaagaaagagaaatgtcctcattgacaaagagtcatgttcagtgcagctggcgagagctctaagaagccatatgtgggcgaggctagctcgaggacggcctatttacggccttgaggtccctgatgtactagaatctatgcgaggccaccttattcggcgtcatgagacatgtgtcatctgcgagtgtggatcagtcaactacggatggttttttgtcccctcgggttgccaactggatgatattgacaaggaaacatcatccttgagagtcccatatattggttctaccactgatgagagaacagacatgaagcttgccttcgtaagagccccaagtcgatccttgcgatctgctgttagaatagcaacagtgtactcatgggcttacggtgatgatgatagctcttggaacgaagcctggttgttggctaggcaaagggccaatgtgagcctggaggagctaagggtgatcactcccatctcaacttcgactaatttagcgcataggttgagggatcgtagcactcaagtgaaatactcaggtacatcccttgtccgagtggcgaggtataccacaatctccaacgacaatctctcatttgtcatatcagataagaaggttgatactaactttatataccaacaaggaatgcttctagggttgggtgttttagaaacattgtttcgactcgagaaagataccggatcatctaacacggtattacatcttcacgtcgaaacagattgttgcgtgatcccgatgatagatcatcccaggatacccagctcccgcaagctagagctgagggcagagctatgtaccaacccattgatatatgataatgcacctttaattgacagagatgcaacaaggctatacacccagagccataggaggcaccttgtggaatttgttacatggtccacaccccaactatatcacattttagctaagtccacagcactatctatgattgacctggtaacaaaatttgagaaggaccatatgaatgaaatttcagctctcataggggatgacgatatcaatagtttcataactgagtttctgctcatagagccaagattattcactatctacttgggccagtgtgcggccatcaattgggcatttgatgtacattatcatagaccatcagggaaatatcagatgggtgagctgttgtcatcgttcctttctagaatgagcaaaggagtgtttaaggtgcttgtcaatgctctaagccacccaaagatctacaagaaattctggcattgtggtattatagagcctatccatggtccttcacttgatgctcaaaacttgcacacaactgtgtgcaacatggtttacacatgctatatgacctacctcgacctgttgttgaatgaagagttagaagagttcacatttctcttgtgtgaaagcgacgaggatgtagtaccggacagattcgacaacatccaggcaaaacacttatgtgttctggcagatttgtactgtcaaccagggacctgcccaccaattcgaggtctaagaccggtagagaaatgtgcagttctaaccgaccatatcaaggcagaggctatgttatctccagcaggatcttcgtggaacataaatccaattattgtagaccattactcatgctctctgacttatctccggcgaggatcgatcaaacagataagattgagagttgatccaggattcattttcgacgccctcgctgaggtaaatgtcagtcagccaaagatcggcagcaacaacatctcaaatatgagcatcaaggctttcagacccccacacgatgatgttgcaaaattgctcaaagatatcaacacaagcaagcacaatcttcccatttcagggggcaatctcgccaattatgaaatccatgctttccgcagaatcgggttgaactcatctgcttgctacaaagctgttgagatatcaacattaattaggagatgccttgagccaggggaggacggcttgttcttgggtgagggatcgggttctatgttgatcacttataaagagatacttaaactaaacaagtgcttctataatagtggggtttccgccaattctagatctggtcaaagggaattagcaccctatccctccgaagttggccttgtcgaacacagaatgggagtaggtaatattgtcaaagtgctctttaacgggaggcccgaagtcacgtgggtaggcagtgtagattgcttcaatttcatagttagtaatatccctacctctagtgtggggtttatccattcagatatagagaccttgcctgacaaagatactatagagaagctagaggaattggcagccatcttatcgatggctctgctcctgggcaaaataggatcaatactggtgattaagcttatgcctttcagcggggattttgttcagggatttataagttatgtagggtctcattatagagaagtgaaccttgtataccctagatacagcaacttcatctctactgaatcttatttggttatgacagatctcaaggctaaccggctaatgaatcctgaaaagattaagcagcagataattgaatcatctgtgaggacttcacctggacttataggtcacatcctatccattaagcaactaagctgcatacaagcaattgtgggagacgcagttagtagaggtgatatcaatcctactctgaaaaaacttacacctatagagcaggtgctgatcaattgcgggttggcaattaacggacctaagctgtgcaaagaattgatccaccatgatgttgcctcagggcaagatggattgcttaattctatactcatcctctacagggagttggcaagattcaaagacaaccaaagaagtcaacaagggatgttccacgcttaccccgtattggtaagtagcaggcaacgagaacttatatctaggatcacccgcaaattctgggggcacattcttctttactccgggaacaaaaagttgataaataagtttatccagaatctcaagtccggctatctgatactagacttacaccagaatatcttcgttaagaatctatccaagtcagagaaacagattattatgacggggggtttgaaacgtgagtgggtttttaaggtaacagtcaaggagaccaaagaatggtataagttagtcggatacagtgccctgattaaggactaattggttgaactccggaaccctaatcctgccctaggtggttaggcattatttgcaatatattaaagaaaactttgaaaatacgaagtttctattcccagctttgtctggt

SEQ ID NO: 62 - DNA, 17190 bp, synthetic construct
  source 1..17190: mol_type = other DNA
accaaacaaagttgggtaaggatagttcaatcaatgatcatcttctagtgcacttaggattcaagatcctattatcagggacaagagcaggattagggatatccgagatggccacacttttaaggagcttagcattgttcaaaagaaacaaggacaaaccacccattacatcaggatccggtggagccatcagaggaatcaaacacattattatagtaccaatccctggagattcctcaattaccactcgatccagacttctggaccggttggtgaggttaattggaaacccggatgtgagcgggcccaaactaacaggggcactaataggtatattatccttatttgtggagtctccaggtcaattgattcagaggatcaccgatgaccctgacgttagcataaggctgttagaggttgtccagagtgaccagtcacaatctggccttaccttcgcatcaagaggtaccaacatggaggatgaggcggaccaatacttttcacatgatgatccaattagtagtgatcaatccaggttcggatggttcgggaacaaggaaatctcagatattgaagtgcaagaccctgagggattcaacatgattctgggtaccatcctagcccaaatttgggtcttgctcgcaaaggcggttacggccccagacacggcagctgattcggagctaagaaggtggataaagtacacccaacaaagaagggtagttggtgaatttagattggagagaaaatggttggatgtggtgaggaacaggattgccgaggacctctccttacgccgattcatggtcgctctaatcctggatatcaagagaacacccggaaacaaacccaggattgctgaaatgatatgtgacattgatacatatatcgtagaggcaggattagccagttttatcctgactattaagtttgggatagaaactatgtatcctgctcttggactgcatgaatttgctggtgagttatccacacttgagtccttgatgaacctttaccagcaaatgggggaaactgcaccctacatggtaatcctggagaactcaattcagaacaagttcagtgcaggatcataccctctgctctggagctatgccatgggagtaggagtggaacttgaaaactccatgggaggtttgaactttggccgatcttactttgatccagcatattttagattagggcaagagatggtaaggaggtcagctggaaaggtcagttccacattggcatctgaactcggtatcactgccgaggatgcaaggcttgtttcagagattgcaatgcatactactgaggacaagatcagtagagcggttggacccagacaagcccaagtatcatttctacacggtgatcaaagtgagaatgagctaccgagattggggggcaaggaagataggagggtcaaacagagtcgaggagaagccagggagagctacagagaaaccgggcccagcagagcaagtgatgcgagagctgcccatcttccaaccggcacacccctagacattgacactgcaacggagtccagccaagatccgcaggacagtcgaaggtcagctgacgccctgcttaggctgcaagccatggcaggaatctcggaagaacaaggctcagacacggacacccctatagtgtacaatgacagaaatcttctagactaggtgcgagaggccgagggccagaacaacatccgcctaccatccatcattgttataaaaaacttaggaaccaggtccacacagccgccagcccatcaaccatccactcccacgattggagccaatggcagaagagcaggcacgccatgtcaaaaacggactggaatgcatccgggctctcaaggccgagcccatcggctcactggccatcgaggaagctatggcagcatggtcagaaatatcagacaacccaggacaggagcgagccacctgcagggaagagaaggcaggcagttcgggtctcagcaaaccatgcctctcagcaattggatcaactgaaggcggtgcacctcgcatccgcggtcagggacctggagagagcgatgacgacgctgaaactttgggaatccccccaagaaatctccaggcatcaagcactgggttacagtgttattacgtttatgatcacagcggtgaagcggttaagggaatccaagatgctgactctatcatggttcaatcaggccttgatggtgatagcaccctctcaggaggagacaatgaatctgaaaacagcgatgtggatattggcgaacctgataccgagggatatgctatcactgaccggggatctgctcccatctctatggggttcagggcttctgatgttgaaactgcagaaggaggggagatccacgagctcctgagactccaatccagaggcaacaactttccgaagcttgggaaaactctcaatgttcctccgcccccggaccccggtagggccagcacttccgggacacccattaaaaagggcacagacgcgagattagcctcatttggaacggagatcgcgtctttattgacaggtggtgcaacccaatgtgctcgaaagtcaccctcggaaccatcagggccaggtgcacctgcggggaatgtccccgagtgtgtgagcaatgccgcactgatacaggagtggacacccgaatctggtaccacaatctccccgagatcccagaataatgaagaagggggagactattatgatgatgagctgttctctgatgtccaagatattaaaacagccttggccaaaatacacgaggataatcagaagataatctccaagctagaatcactgctgttattgaagggagaagttgagtcaattaagaagcagatcaacaggcaaaatatcagcatatccaccctggaaggacacctctcaagcatcatgatcgccattcctggacttgggaaggatcccaacgaccccactgcagatgtcgaaatcaatcccgacttgaaacccatcataggcagagattcaggccgagcactggccgaagttctcaagaaacccgttgccagccgacaactccaaggaatgacaaatggacggaccagttccagaggacagctgctgaaggaatttcagctaaagccgatcgggaaaaagatgagctcagccgtcgggtttgttcctgacaccggccctgcatcacgcagtgtaatccgctccattataaaatccagccggctagaggaggatcggaagcgttacctgatgactctccttgatgatatcaaaggagccaatgatcttgccaagttccaccagatgctgatgaagataataatgaagtagctacagctcaacttacctgccaaccccatgccagtcgacccaactagtacaacctaaatccattataaaaaacttaggagcaaagtgattgcctcccaaggtccacaatgacagagacctacgacttcgacaagtcggcatgggacatcaaagggtcgatcgctccgatacaacccaccacctacagtgatggcaggctggtgccccaggtcagagtcatagatcctggtctaggcgacaggaaggatgaatgctttatgtacatgtttctgctgggggttgttgaggacagcgattccctagggcctccaatcgggcgagcatttgggttcctgcccttaggtgttggcagatccacagcaaagcccgaaaaactcctcaaagaggccactgagcttgacatagttgttagacgtacagcagggctcaatgaaaaactggtgttctacaacaacaccccactaactctcctcacaccttggagaaaggtcctaacaacagggagtgtcttcaacgcaaaccaagtgtgcaatgcggttaatctgataccgctcgataccccgcagaggttccgtgttgtttatatgagcatcacccgtctttcggataacgggtattacaccgttcctagaagaatgctggaattcagatcggtcaatgcagtggccttcaacctgctggtgacccttaggattgacaaggcgataggccctgggaagatcatcgacaatacagagcaacttcctgaggcaacatttatggtccacatcgggaacttcaggagaaagaagagtgaagtctactctgccgattattgcaaaatgaaaatcgaaaagatgggcctggtttttgcacttggtgggatagggggcaccagtcttcacattagaagcacaggcaaaatgagcaagactctccatgcacaactcgggttcaagaagaccttatgttacccgctgatggatatcaatgaagaccttaatcgattactctggaggagcagatgcaagatagtaagaatccaggcagttttgcagccatcagttcctcaagaattccgcatttacgacgacgtgatcataaatgatgaccaaggactattcaaagttctgtagaccgtagtgcccagcaatgcccgaaaacgacccccctcacaatgacagccagaaggcccggacaaaaaagccccctccgaaagactccacggaccaagcgagaggccagccagcagccgacggcaagcgcgaacaccaggcggccccagcacagaacagccctgacacaaggccaccaccagccaccccaatctgcatcctcctcgtgggacccccgaggaccaacccccaaggctgcccccgatccaaaccaccaaccgcatccccaccacccccgggaaagaaacccccagcaattggaaggcccctccccctcttcctcaacacaagaactccacaaccgaaccgcacaagcgaccgaggtgacccaaccgcaggcatccgactccctagacagatcctctctccccggcaaactaaacaaaacttagggccaaggaacatacacacccaacagaacccagaccccggcccacggcgccgcgcccccaacccccgacaaccagagggagcccccaaccaatcccgccggctcccccggtgcccacaggcagggacaccaacccccgaacagacccagcacccaaccatcgacaatccaagacgggggggcccccccaaaaaaaggcccccaggggccgacagccagcaccgcgaggaagcccacccaccccacacacgaccacggcaaccaaaccagaacccagaccaccctgggccaccagctcccagactcggccatcaccccgcagaaaggaaaggccacaacccgcgcaccccagccccgatccggcggggagccacccaacccgaaccagcacccaagagcgatccccgaaggacccccgaaccgcaaaggacatcagtatcccacagcctctccaagtcccccggtctcctcctcttctcgaagggaccaaaagatcaatccaccacacccgacgacactcaactccccacccctaaaggagacaccgggaatcccagaatcaagactcatccaatgtccatcatgggtctcaaggtgaacgtctctgccatattcatggcagtactgttaactctccaaacacccaccggtcaaatccattggggcaatctctctaagataggggtggtaggaataggaagtgcaagctacaaagttatgactcgttccagccatcaatcattagtcataaaattaatgcccaatataactctcctcaataactgcacgagggtagagattgcagaatacaggagactactgagaacagttttggaaccaattagagatgcacttaatgcaatgacccagaatataagaccggttcagagtgtagcttcaagtaggagacacaagagatttgcgggagtagtcctggcaggtgcggccctaggcgttgccacagctgctcagataacagccggcattgcacttcaccagtccatgctgaactctcaagccatcgacaatctgagagcgagcctggaaactactaatcaggcaattgagacaatcagacaagcagggcaggagatgatattggctgttcagggtgtccaagactacatcaataatgagctgataccgtctatgaaccaactatcttgtgatttaatcggccagaagctcgggctcaaattgctcagatactatacagaaatcctgtcattatttggccccagtttacgggaccccatatctgcggagatatctatccaggctttgagctatgcgcttggaggagacatcaataaggtgttagaaaagctcggatacagtggaggtgatttactgggcatcttagagagcggaggaataaaggcccggataactcacgtcgacacagagtcctacttcattgtcctcagtatagcctatccgacgctgtccgagattaagggggtgattgtccaccggctagagggggtctcgtacaacataggctctcaagagtggtataccactgtgcccaagtatgttgcaacccaagggtaccttatctcgaattttgatgagtcatcgtgtactttcatgccagaggggactgtgtgcagccaaaatgccttgtacccgatgagtcctctgctccaagaatgcctccgggggtacaccaagtcctgtgctcgtacactcgtatccgggtcttttgggaaccggttcattttatcacaagggaacctaatagccaattgtgcatcaatcctttgcaagtgttacacaacaggaacgatcattaatcaagaccctgacaagatcctaacatacattgctgccgatcactgcccggtagtcgaggtgaacggcgtgaccatccaagtcgggagcaggaggtatccagacgctgtgtacttgcacagaattgacctcggtcctcccatatcattggagaggttggacgtagggacaaatctggggaatgcaattgctaagttggaggatgccaaggaattgttggagtcatcggaccagatattgaggagtatgaaaggtttatcgagcactagcatagtctacatcctgattgcagtgtgtcttggagggttgatagggatccccgctttaatatgttgctgcagggggcgttgtaacaaaaagggagaacaagttggtatgtcaagaccaggcctaaagcctgatcttacgggaacatcaaaatcctatgtaaggtcgctctgatcctctacaactcttgaaacacaaatgtcccacaagtctcctcttcgtcatcaagcaaccaccgcacccagcatcaagcccacctgaaattatctccggcttccctctggccgaacaatatcggtagttaatcaaaacttagggtgcaagatcatccacaatgtcaccacaacgagaccggataaatgccttctacaaagataacccccatcccaagggaagtaggatagtcattaacagagaacatcttatgattgatagaccttatgttttgctggctgttctgtttgtcatgtttctgagcttgatcgggttgctagccattgcaggcattagacttcatcgggcagccatctacaccgcagagatccataaaagcctcagcaccaatctagatgtaactaactcaatcgagcatcaggtcaaggacgtgctgacaccactcttcaaaatcatcggtgatgaagtgggcctgaggacacctcagagattcactgacctagtgaaattaatctctgacaagattaaattccttaatccggatagggagtacgacttcagagatctcacttggtgtatcaacccgccagagagaatcaaattggattatgatcaatactgtgcagatgtggctgctgaagagctcatgaatgcattggtgaactcaactctactggagaccagaacaaccaatcagttcctagctgtctcaaagggaaactgctcagggcccactacaatcagaggtcaattctcaaacatgtcgctgtccctgttagacttgtatttaggtcgaggttacaatgtgtcatctatagtcactatgacatcccagggaatgtatgggggaacttacctagtggaaaagcctaatctgagcagcaaaaggtcagagttgtcacaactgagcatgtaccgagtgtttgaagtaggtgttatcagaaatccgggtttgggggctccggtgttccatatgacaaactatcttgagcaaccagtcagtaatgatctcagcaactgtatggtggctttgggggagctcaaactcgcagccctttgtcacggggaagattctatcacaattccctatcagggatcagggaaaggtgtcagcttccagctcgtcaagctaggtgtctggaaatccccaaccgacatgcaatcctgggtccccttatcaacggatgatccagtgatagacaggctttacctctcatctcacagaggtgttatcgctgacaatcaagcaaaatgggctgtcccgacaacacgaacagatgacaagttgcgaatggagacatgcttccaacaggcgtgtaagggtaaaatccaagcactctgcgagaatcccgagtgggcaccattgaaggataacaggattccttcatacggggtcttgtctgttgatctgagtctgacagttgagcttaaaatcaaaattgcttcgggattcgggccattgatcacacacggttcagggatggacctatacaaatccaaccacaacaatgtgtattggctgactatcccgccaatgaagaacctagccttaggtgtaatcaacacattggagtggataccgagattcaaggttagtccctacctcttcactgtcccaattaaggaagcaggcgaagactgccatgccccaacatacctacctgcggaggtggatggtgatgtcaaactcagttccaatctggtgattctacctggtcaagatctccaatatgttttggcaacctacgatacttccagggttgaacatgctgtggtttattacgtttacagcccaagccgctcattttcttacttttatccttttaggttgcctataaagggggtccccatcgaattacaagtggaatgcttcacatgggaccaaaaactctggtgccgtcacttctgtgtgcttgcggactcagaatctggtggacatatcactcactctgggatggtgggcatgggagtcagctgcacagtcacccgggaagatggaaccaatcgcagatagggctgctagtgaaccaatcacatgatgtcacccagacatcaggcatacccactagtctaccctccatcattgttataaaaaacttaggaaccaggtccacacagccgccagcccatcaacgcgtacggccaccatgggtagacttacaagtggggtgggaactgccgcacttttggttgttgctgtgggcttgcgagtggtttgcgctaaatacgcactcgccgatccgtccctcaaaatggcagaccccaatcggtttcggggcaagaatttgccagtccttgaccagctgacagaccctccaggggttaagagagtgtatcacatccagccctcccttgaggaccccttccaacccccatctataccgatcaccgtgtattacgccgtgctcgaacgcgcttgcaggtctgtgttgctgcacgcaccatctgaggctccccagattgttagaggggcaagcgacgaagcgagaaagcacacttacaacctcaccatagcttggtaccgcatgggcgacaactgcgccatcccaatcactgttatggaatatactgagtgcccttacaataaatctctgggtgtgtgtcctattaggacacagcctcgctggagctactatgactccttctctgccgtgagtgaagataatttgggtttcctgatgcacgcacccgcctttgagacagcaggtacgtaccttaggcttgtaaaaatcaacgattggaccgagataacccagtttattctggagcacagggctagagcatcctgtaaatacgcgttgccactccggataccaccagccgcttgcttgacctccaaggcttatcaacagggcgtaacggtggattccatcggcatgctccctaggttcatccctgaaaatcaaagaacggtggcactgtattcactcaagattgccggctggcacggccctaagccaccatacacctctactctgctgcccccggagctgagtgataccactaacgcaacccagcctgaactggtgccagaggatcctgaagattctgcattgctggaagacccagccggcactgtgtctagtcaaattccccctaattggcacataccgagcattcaggacgttgctccacaccacgctccggctgctccaagcaatcctggcctgataataggtgcattggccggttctaccctcgccgtcctggtgattgggggtatcgccttctgggttaggaggagagctcaaatggcccccaagcgcttgaggttgccgcacataagagacgacgacgcccccccttctcaccagcctctgttttattaggcgcgcagcgcttagacgtctcgcgatcgatgctagtgtgaaatagacatcagaattaagaaaaacgtagggtccaagtggttccccgttatggactcgctatctgtcaaccagatcttataccctgaagttcacctagatagcccgatagttaccaataagatagtagccatcctggagtatgctcgagtccctcacgcttacagcctggaggaccctacactgtgtcagaacatcaagcaccgcctaaaaaacggattttccaaccaaatgattataaacaatgtggaagttgggaatgtcatcaagtccaagcttaggagttatccggcccactctcatattccatatccaaattgtaatcaggatttatttaacatagaagacaaagagtcaacgaggaagatccgtgaactcctcaaaaaggggaattcgctgtactccaaagtcagtgataaggttttccaatgcttaagggacactaactcacggcttggcctaggctccgaattgagggaggacatcaaggagaaagttattaacttgggagtttacatgcacagctcccagtggtttgagccctttctgttttggtttacagtcaagactgagatgaggtcagtgattaaatcacaaacccatacttgccataggaggagacacacacctgtattcttcactggtagttcagttgagttgctaatctctcgtgaccttgttgctataatcagtaaagagtctcaacatgtatattacctgacatttgaactggttttgatgtattgtgatgtcatagaggggaggttaatgacagagaccgctatgactattgatgctaggtatacagagcttctaggaagagtcagatacatgtggaaactgatagatggtttcttccctgcactcgggaatccaacttatcaaattgtagccatgctggagcctctttcacttgcttacctgcagctgagggatataacagtagaactcagaggtgctttccttaaccactgctttactgaaatacatgatgttcttgaccaaaacgggttttctgatgaaggtacttatcatgagttaactgaagctctagattacattttcataactgatgacatacatctgacaggggagattttctcatttttcagaagtttcggccaccccagacttgaagcagtaacggctgctgaaaatgttaggaaatacatgaatcagcctaaagtcattgtgtatgagactctgatgaaaggtcatgccatattttgtggaatcataatcaacggctatcgtgacaggcacggaggcagttggccaccgctgaccctccccctgcatgctgcagacacaatccggaatgctcaagcttcaggtgaagggttaacacatgagcagtgcgttgataactggaaatcttttgctggagtgaaatttggctgctttatgcctcttagcctggatagtgatctgacaatgtacctaaaggacaaggcacttgctgctctccaaagggaatgggattcagtttacccgaaagagttcctgcgttacgaccctcccaagggaaccgggtcacggaggcttgtagatgttttccttaatgattcgagctttgacccatatgatgtgataatgtatgttgtaagtggagcttacctccatgaccctgagttcaacctgtcttacagcctgaaagaaaaggagatcaaggaaacaggtagactttttgctaaaatgacttacaaaatgagggcatgccaagtgattgctgaaaatctaatctcaaacgggattggcaaatattttaaggacaatgggatggccaaggatgagcacgatttgactaaggcactccacactctagctgtctcaggagtccccaaagatctcaaagaaagtcacaggggggggccagtcttaaaaacctactcccgaagcccagtccacacaagtaccaggaacgtgagagcagcaaaagggtttatagggttccctcaagtaattcggcaggaccaagacactgatcatccggagaatatggaagcttacgagacagtcagtgcatttatcacgactgatctcaagaagtactgccttaattggagatatgagaccatcagcttgtttgcacagaggctaaatgagatttacggattgccctcatttttccagtggctgcataagaggcttgagacctctgtcctgtatgtaagtgaccctcattgcccccccgaccttgacgcccatatcccgttatataaagtccccaatgatcaaatcttcattaagtaccctatgggaggtatagaagggtattgtcagaagctgtggaccatcagcaccattccctatctatacctggctgcttatgagagcggagtaaggattgcttcgttagtgcaaggggacaatcagaccatagccgtaacaaaaagggtacccagcacatggccctacaaccttaagaaacgggaagctgctagagtaactagagattactttgtaattcttaggcaaaggctacatgatattggccatcacctcaaggcaaatgagacaattgtttcatcacatttttttgtctattcaaaaggaatatattatgatgggctacttgtgtcccaatcactcaagagcatcgcaagatgtgtattctggtcagagactatagttgatgaaacaagggcagcatgcagtaatattgctacaacaatggctaaaagcatcgagagaggttatgaccgttaccttgcatattccctgaacgtcctaaaagtgatacagcaaattctgatctctcttggcttcacaatcaattcaaccatgacccgggatgtagtcatacccctcctcacaaacaacgacctcttaataaggatggcactgttgcccgctcctattggggggatgaattatctgaatatgagcaggctgtttgtcagaaacatcggtgatccagtaacatcatcaattgctgatctcaagagaatgattctcgcctcactaatgcctgaagagaccctccatcaagtaatgacacaacaaccgggggactcttcattcctagactgggctagcgacccttactcagcaaatcttgtatgtgtccagagcatcactagactcctcaagaacataactgcaaggtttgtcctgatccatagtccaaacccaatgttaaaaggattattccatgatgacagtaaagaagaggacgagggactggcggcattcctcatggacaggcatattatagtacctagggcagctcatgaaatcctggatcatagtgtcacaggggcaagagagtctattgcaggcatgctggataccacaaaaggcttgattcgagccagcatgaggaagggggggttaacctctcgagtgataaccagattgtccaattatgactatgaacaattcagagcagggatggtgctattgacaggaagaaagagaaatgtcctcattgacaaagagtcatgttcagtgcagctggcgagagctctaagaagccatatgtgggcgaggctagctcgaggacggcctatttacggccttgaggtccctgatgtactagaatctatgcgaggccaccttattcggcgtcatgagacatgtgtcatctgcgagtgtggatcagtcaactacggatggttttttgtcccctcgggttgccaactggatgatattgacaaggaaacatcatccttgagagtcccatatattggttctaccactgatgagagaacagacatgaagcttgccttcgtaagagccccaagtcgatccttgcgatctgctgttagaatagcaacagtgtactcatgggcttacggtgatgatgatagctcttggaacgaagcctggttgttggctaggcaaagggccaatgtgagcctggaggagctaagggtgatcactcccatctcaacttcgactaatttagcgcataggttgagggatcgtagcactcaagtgaaatactcaggtacatcccttgtccgagtggcgaggtataccacaatctccaacgacaatctctcatttgtcatatcagataagaaggttgatactaactttatataccaacaaggaatgcttctagggttgggtgttttagaaacattgtttcgactcgagaaagataccggatcatctaacacggtattacatcttcacgtcgaaacagattgttgcgtgatcccgatgatagatcatcccaggatacccagctcccgcaagctagagctgagggcagagctatgtaccaacccattgatatatgataatgcacctttaattgacagagatgcaacaaggctatacacccagagccataggaggcaccttgtggaatttgttacatggtccacaccccaactatatcacattttagctaagtccacagcactatctatgattgacctggtaacaaaatttgagaaggaccatatgaatgaaatttcagctctcataggggatgacgatatcaatagtttcataactgagtttctgctcatagagccaagattattcactatctacttgggccagtgtgcggccatcaattgggcatttgatgtacattatcatagaccatcagggaaatatcagatgggtgagctgttgtcatcgttcctttctagaatgagcaaaggagtgtttaaggtgcttgtcaatgctctaagccacccaaagatctacaagaaattctggcattgtggtattatagagcctatccatggtccttcacttgatgctcaaaacttgcacacaactgtgtgcaacatggtttacacatgctatatgacctacctcgacctgttgttgaatgaagagttagaagagttcacatttctcttgtgtgaaagcgacgaggatgtagtaccggacagattcgacaacatccaggcaaaacacttatgtgttctggcagatttgtactgtcaaccagggacctgcccaccaattcgaggtctaagaccggtagagaaatgtgcagttctaaccgaccatatcaaggcagaggctatgttatctccagcaggatcttcgtggaacataaatccaattattgtagaccattactcatgctctctgacttatctccggcgaggatcgatcaaacagataagattgagagttgatccaggattcattttcgacgccctcgctgaggtaaatgtcagtcagccaaagatcggcagcaacaacatctcaaatatgagcatcaaggctttcagacccccacacgatgatgttgcaaaattgctcaaagatatcaacacaagcaagcacaatcttcccatttcagggggcaatctcgccaattatgaaatccatgctttccgcagaatcgggttgaactcatctgcttgctacaaagctgttgagatatcaacattaattaggagatgccttgagccaggggaggacggcttgttcttgggtgagggatcgggttctatgttgatcacttataaagagatacttaaactaaacaagtgcttctataatagtggggtttccgccaattctagatctggtcaaagggaattagcaccctatccctccgaagttggccttgtcgaacacagaatgggagtaggtaatattgtcaaagtgctctttaacgggaggcccgaagtcacgtgggtaggcagtgtagattgcttcaatttcatagttagtaatatccctacctctagtgtggggtttatccattcagatatagagaccttgcctgacaaagatactatagagaagctagaggaattggcagccatcttatcgatggctctgctcctgggcaaaataggatcaatactggtgattaagcttatgcctttcagcggggattttgttcagggatttataagttatgtagggtctcattatagagaagtgaaccttgtataccctagatacagcaacttcatctctactgaatcttatttggttatgacagatctcaaggctaaccggctaatgaatcctgaaaagattaagcagcagataattgaatcatctgtgaggacttcacctggacttataggtcacatcctatccattaagcaactaagctgcatacaagcaattgtgggagacgcagttagtagaggtgatatcaatcctactctgaaaaaacttacacctatagagcaggtgctgatcaattgcgggttggcaattaacggacctaagctgtgcaaagaattgatccaccatgatgttgcctcagggcaagatggattgcttaattctatactcatcctctacagggagttggcaagattcaaagacaaccaaagaagtcaacaagggatgttccacgcttaccccgtattggtaagtagcaggcaacgagaacttatatctaggatcacccgcaaattctgggggcacattcttctttactccgggaacaaaaagttgataaataagtttatccagaatctcaagtccggctatctgatactagacttacaccagaatatcttcgttaagaatctatccaagtcagagaaacagattattatgacggggggtttgaaacgtgagtgggtttttaaggtaacagtcaaggagaccaaagaatggtataagttagtcggatacagtgccctgattaaggactaattggttgaactccggaaccctaatcctgccctaggtggttaggcattatttgcaatatattaaagaaaactttgaaaatacgaagtttctattcccagctttgtctggt

SEQ ID NO: 63 - DNA, 18714 bp, synthetic construct
  source 1..18714: mol_type = other DNA
accaaacaaagttgggtaaggatagttcaatcaatgatcatcttctagtgcacttaggattcaagatcctattatcagggacaagagcaggattagggatatccgagatggccacacttttaaggagcttagcattgttcaaaagaaacaaggacaaaccacccattacatcaggatccggtggagccatcagaggaatcaaacacattattatagtaccaatccctggagattcctcaattaccactcgatccagacttctggaccggttggtgaggttaattggaaacccggatgtgagcgggcccaaactaacaggggcactaataggtatattatccttatttgtggagtctccaggtcaattgattcagaggatcaccgatgaccctgacgttagcataaggctgttagaggttgtccagagtgaccagtcacaatctggccttaccttcgcatcaagaggtaccaacatggaggatgaggcggaccaatacttttcacatgatgatccaattagtagtgatcaatccaggttcggatggttcgggaacaaggaaatctcagatattgaagtgcaagaccctgagggattcaacatgattctgggtaccatcctagcccaaatttgggtcttgctcgcaaaggcggttacggccccagacacggcagctgattcggagctaagaaggtggataaagtacacccaacaaagaagggtagttggtgaatttagattggagagaaaatggttggatgtggtgaggaacaggattgccgaggacctctccttacgccgattcatggtcgctctaatcctggatatcaagagaacacccggaaacaaacccaggattgctgaaatgatatgtgacattgatacatatatcgtagaggcaggattagccagttttatcctgactattaagtttgggatagaaactatgtatcctgctcttggactgcatgaatttgctggtgagttatccacacttgagtccttgatgaacctttaccagcaaatgggggaaactgcaccctacatggtaatcctggagaactcaattcagaacaagttcagtgcaggatcataccctctgctctggagctatgccatgggagtaggagtggaacttgaaaactccatgggaggtttgaactttggccgatcttactttgatccagcatattttagattagggcaagagatggtaaggaggtcagctggaaaggtcagttccacattggcatctgaactcggtatcactgccgaggatgcaaggcttgtttcagagattgcaatgcatactactgaggacaagatcagtagagcggttggacccagacaagcccaagtatcatttctacacggtgatcaaagtgagaatgagctaccgagattggggggcaaggaagataggagggtcaaacagagtcgaggagaagccagggagagctacagagaaaccgggcccagcagagcaagtgatgcgagagctgcccatcttccaaccggcacacccctagacattgacactgcaacggagtccagccaagatccgcaggacagtcgaaggtcagctgacgccctgcttaggctgcaagccatggcaggaatctcggaagaacaaggctcagacacggacacccctatagtgtacaatgacagaaatcttctagactaggtgcgagaggccgagggccagaacaacatccgcctaccatccatcattgttataaaaaacttaggaaccaggtccacacagccgccagcccatcaaccatccactcccacgattggagccaatggcagaagagcaggcacgccatgtcaaaaacggactggaatgcatccgggctctcaaggccgagcccatcggctcactggccatcgaggaagctatggcagcatggtcagaaatatcagacaacccaggacaggagcgagccacctgcagggaagagaaggcaggcagttcgggtctcagcaaaccatgcctctcagcaattggatcaactgaaggcggtgcacctcgcatccgcggtcagggacctggagagagcgatgacgacgctgaaactttgggaatccccccaagaaatctccaggcatcaagcactgggttacagtgttattacgtttatgatcacagcggtgaagcggttaagggaatccaagatgctgactctatcatggttcaatcaggccttgatggtgatagcaccctctcaggaggagacaatgaatctgaaaacagcgatgtggatattggcgaacctgataccgagggatatgctatcactgaccggggatctgctcccatctctatggggttcagggcttctgatgttgaaactgcagaaggaggggagatccacgagctcctgagactccaatccagaggcaacaactttccgaagcttgggaaaactctcaatgttcctccgcccccggaccccggtagggccagcacttccgggacacccattaaaaagggcacagacgcgagattagcctcatttggaacggagatcgcgtctttattgacaggtggtgcaacccaatgtgctcgaaagtcaccctcggaaccatcagggccaggtgcacctgcggggaatgtccccgagtgtgtgagcaatgccgcactgatacaggagtggacacccgaatctggtaccacaatctccccgagatcccagaataatgaagaagggggagactattatgatgatgagctgttctctgatgtccaagatattaaaacagccttggccaaaatacacgaggataatcagaagataatctccaagctagaatcactgctgttattgaagggagaagttgagtcaattaagaagcagatcaacaggcaaaatatcagcatatccaccctggaaggacacctctcaagcatcatgatcgccattcctggacttgggaaggatcccaacgaccccactgcagatgtcgaaatcaatcccgacttgaaacccatcataggcagagattcaggccgagcactggccgaagttctcaagaaacccgttgccagccgacaactccaaggaatgacaaatggacggaccagttccagaggacagctgctgaaggaatttcagctaaagccgatcgggaaaaagatgagctcagccgtcgggtttgttcctgacaccggccctgcatcacgcagtgtaatccgctccattataaaatccagccggctagaggaggatcggaagcgttacctgatgactctccttgatgatatcaaaggagccaatgatcttgccaagttccaccagatgctgatgaagataataatgaagtagctacagctcaacttacctgccaaccccatgccagtcgacccaactagtacaacctaaatccattataaaaaacttaggagcaaagtgattgcctcccaaggtccacaatgacagagacctacgacttcgacaagtcggcatgggacatcaaagggtcgatcgctccgatacaacccaccacctacagtgatggcaggctggtgccccaggtcagagtcatagatcctggtctaggcgacaggaaggatgaatgctttatgtacatgtttctgctgggggttgttgaggacagcgattccctagggcctccaatcgggcgagcatttgggttcctgcccttaggtgttggcagatccacagcaaagcccgaaaaactcctcaaagaggccactgagcttgacatagttgttagacgtacagcagggctcaatgaaaaactggtgttctacaacaacaccccactaactctcctcacaccttggagaaaggtcctaacaacagggagtgtcttcaacgcaaaccaagtgtgcaatgcggttaatctgataccgctcgataccccgcagaggttccgtgttgtttatatgagcatcacccgtctttcggataacgggtattacaccgttcctagaagaatgctggaattcagatcggtcaatgcagtggccttcaacctgctggtgacccttaggattgacaaggcgataggccctgggaagatcatcgacaatacagagcaacttcctgaggcaacatttatggtccacatcgggaacttcaggagaaagaagagtgaagtctactctgccgattattgcaaaatgaaaatcgaaaagatgggcctggtttttgcacttggtgggatagggggcaccagtcttcacattagaagcacaggcaaaatgagcaagactctccatgcacaactcgggttcaagaagaccttatgttacccgctgatggatatcaatgaagaccttaatcgattactctggaggagcagatgcaagatagtaagaatccaggcagttttgcagccatcagttcctcaagaattccgcatttacgacgacgtgatcataaatgatgaccaaggactattcaaagttctgtagaccgtagtgcccagcaatgcccgaaaacgacccccctcacaatgacagccagaaggcccggacaaaaaagccccctccgaaagactccacggaccaagcgagaggccagccagcagccgacggcaagcgcgaacaccaggcggccccagcacagaacagccctgacacaaggccaccaccagccaccccaatctgcatcctcctcgtgggacccccgaggaccaacccccaaggctgcccccgatccaaaccaccaaccgcatccccaccacccccgggaaagaaacccccagcaattggaaggcccctccccctcttcctcaacacaagaactccacaaccgaaccgcacaagcgaccgaggtgacccaaccgcaggcatccgactccctagacagatcctctctccccggcaaactaaacaaaacttagggccaaggaacatacacacccaacagaacccagaccccggcccacggcgccgcgcccccaacccccgacaaccagagggagcccccaaccaatcccgccggctcccccggtgcccacaggcagggacaccaacccccgaacagacccagcacccaaccatcgacaatccaagacgggggggcccccccaaaaaaaggcccccaggggccgacagccagcaccgcgaggaagcccacccaccccacacacgaccacggcaaccaaaccagaacccagaccaccctgggccaccagctcccagactcggccatcaccccgcagaaaggaaaggccacaacccgcgcaccccagccccgatccggcggggagccacccaacccgaaccagcacccaagagcgatccccgaaggacccccgaaccgcaaaggacatcagtatcccacagcctctccaagtcccccggtctcctcctcttctcgaagggaccaaaagatcaatccaccacacccgacgacactcaactccccacccctaaaggagacaccgggaatcccagaatcaagactcatccaatgtccatcatgggtctcaaggtgaacgtctctgccatattcatggcagtactgttaactctccaaacacccaccggtcaaatccattggggcaatctctctaagataggggtggtaggaataggaagtgcaagctacaaagttatgactcgttccagccatcaatcattagtcataaaattaatgcccaatataactctcctcaataactgcacgagggtagagattgcagaatacaggagactactgagaacagttttggaaccaattagagatgcacttaatgcaatgacccagaatataagaccggttcagagtgtagcttcaagtaggagacacaagagatttgcgggagtagtcctggcaggtgcggccctaggcgttgccacagctgctcagataacagccggcattgcacttcaccagtccatgctgaactctcaagccatcgacaatctgagagcgagcctggaaactactaatcaggcaattgagacaatcagacaagcagggcaggagatgatattggctgttcagggtgtccaagactacatcaataatgagctgataccgtctatgaaccaactatcttgtgatttaatcggccagaagctcgggctcaaattgctcagatactatacagaaatcctgtcattatttggccccagtttacgggaccccatatctgcggagatatctatccaggctttgagctatgcgcttggaggagacatcaataaggtgttagaaaagctcggatacagtggaggtgatttactgggcatcttagagagcggaggaataaaggcccggataactcacgtcgacacagagtcctacttcattgtcctcagtatagcctatccgacgctgtccgagattaagggggtgattgtccaccggctagagggggtctcgtacaacataggctctcaagagtggtataccactgtgcccaagtatgttgcaacccaagggtaccttatctcgaattttgatgagtcatcgtgtactttcatgccagaggggactgtgtgcagccaaaatgccttgtacccgatgagtcctctgctccaagaatgcctccgggggtacaccaagtcctgtgctcgtacactcgtatccgggtcttttgggaaccggttcattttatcacaagggaacctaatagccaattgtgcatcaatcctttgcaagtgttacacaacaggaacgatcattaatcaagaccctgacaagatcctaacatacattgctgccgatcactgcccggtagtcgaggtgaacggcgtgaccatccaagtcgggagcaggaggtatccagacgctgtgtacttgcacagaattgacctcggtcctcccatatcattggagaggttggacgtagggacaaatctggggaatgcaattgctaagttggaggatgccaaggaattgttggagtcatcggaccagatattgaggagtatgaaaggtttatcgagcactagcatagtctacatcctgattgcagtgtgtcttggagggttgatagggatccccgctttaatatgttgctgcagggggcgttgtaacaaaaagggagaacaagttggtatgtcaagaccaggcctaaagcctgatcttacgggaacatcaaaatcctatgtaaggtcgctctgatcctctacaactcttgaaacacaaatgtcccacaagtctcctcttcgtcatcaagcaaccaccgcacccagcatcaagcccacctgaaattatctccggcttccctctggccgaacaatatcggtagttaatcaaaacttagggtgcaagatcatccacaatgtcaccacaacgagaccggataaatgccttctacaaagataacccccatcccaagggaagtaggatagtcattaacagagaacatcttatgattgatagaccttatgttttgctggctgttctgtttgtcatgtttctgagcttgatcgggttgctagccattgcaggcattagacttcatcgggcagccatctacaccgcagagatccataaaagcctcagcaccaatctagatgtaactaactcaatcgagcatcaggtcaaggacgtgctgacaccactcttcaaaatcatcggtgatgaagtgggcctgaggacacctcagagattcactgacctagtgaaattaatctctgacaagattaaattccttaatccggatagggagtacgacttcagagatctcacttggtgtatcaacccgccagagagaatcaaattggattatgatcaatactgtgcagatgtggctgctgaagagctcatgaatgcattggtgaactcaactctactggagaccagaacaaccaatcagttcctagctgtctcaaagggaaactgctcagggcccactacaatcagaggtcaattctcaaacatgtcgctgtccctgttagacttgtatttaggtcgaggttacaatgtgtcatctatagtcactatgacatcccagggaatgtatgggggaacttacctagtggaaaagcctaatctgagcagcaaaaggtcagagttgtcacaactgagcatgtaccgagtgtttgaagtaggtgttatcagaaatccgggtttgggggctccggtgttccatatgacaaactatcttgagcaaccagtcagtaatgatctcagcaactgtatggtggctttgggggagctcaaactcgcagccctttgtcacggggaagattctatcacaattccctatcagggatcagggaaaggtgtcagcttccagctcgtcaagctaggtgtctggaaatccccaaccgacatgcaatcctgggtccccttatcaacggatgatccagtgatagacaggctttacctctcatctcacagaggtgttatcgctgacaatcaagcaaaatgggctgtcccgacaacacgaacagatgacaagttgcgaatggagacatgcttccaacaggcgtgtaagggtaaaatccaagcactctgcgagaatcccgagtgggcaccattgaaggataacaggattccttcatacggggtcttgtctgttgatctgagtctgacagttgagcttaaaatcaaaattgcttcgggattcgggccattgatcacacacggttcagggatggacctatacaaatccaaccacaacaatgtgtattggctgactatcccgccaatgaagaacctagccttaggtgtaatcaacacattggagtggataccgagattcaaggttagtccctacctcttcactgtcccaattaaggaagcaggcgaagactgccatgccccaacatacctacctgcggaggtggatggtgatgtcaaactcagttccaatctggtgattctacctggtcaagatctccaatatgttttggcaacctacgatacttccagggttgaacatgctgtggtttattacgtttacagcccaagccgctcattttcttacttttatccttttaggttgcctataaagggggtccccatcgaattacaagtggaatgcttcacatgggaccaaaaactctggtgccgtcacttctgtgtgcttgcggactcagaatctggtggacatatcactcactctgggatggtgggcatgggagtcagctgcacagtcacccgggaagatggaaccaatcgcagatagggctgctagtgaaccaatcacatgatgtcacccagacatcaggcatacccactagtctaccctccatcattgttataaaaaacttaggaaccaggtccacacagccgccagcccatcaacgcgtacggccaccatgaggggaggaggccttgtctgtgcacttgttgtaggagctttggtcgccgccgtagctagtgcagctccagcagcaccaagggcttcaggaggggttgcagctactgttgctgctaacggaggacctgctagccaaccacctccggtgccttctccggctactaccaaagcccgcaagcgaaaaacaaagaagcccccaaagaggccagaggccacacctccacccgacgctaacgctactgtggcggctggacacgctactttgagagcccacctgcgggaaatcaaggttgagaacgcagacgcacaattctacgtttgtcccccccctacaggtgcaacagtcgtgcagtttgagcagccaagacgctgtcctactaggcctgagggacaaaattacaccgagggtatcgccgtagtttttaaggagaatatcgcaccctataagtttaaagcgacaatgtactataaggatgtgaccgtcagccaagtctggtttggtcaccgatacagtcagtttatgggaatctttgaggaccgggccccggtccctttcgaagaagtgatcgacaagattaacgccaagggagtgtgcaggtcaaccgcaaagtacgtccgaaacaatatggaaacaaccgccttccacagggacgaccacgaaacagatatggagcttaagccggctaaagtggccactcgcacgtcaagaggttggcataccacggacctgaaatataacccttctagagttgaagctttccaccggtatgggaccacggtgaactgtattgtggaagaagtggacgccagatccgtgtacccctacgacgaattcgttcttgctacaggcgatttcgtgtatatgtctcctttctacggctacagggagggctcccacaccgagcacacctcctacgccgcagatagatttaaacaggtggacggcttctacgctcgcgatctgactactaaggcacgggcaacaagcccaacaactcgcaatttgctgaccacaccaaagtttactgtggcctgggactgggtacccaagaggcctgctgtttgcacaatgaccaaatggcaggaggttgacgagatgctccgggccgaatatggaggatcctttagattctcttctgacgctatcagtaccaccttcaccacaaatctgactcagtactctctgtctcgcgtagatctgggagactgtatcggtagggacgcacgcgaggctatagatcggatgttcgcccggaaatacaacgccacccacattaaagtggggcagccccagtattacttggctactgggggcttccttatcgcttatcagcctctgctctcaaataccctggcggagctttatgtacgcgagtatatgagggagcaggacaggaagccacgcaacgctaccccagcacccctgagagaagcgccttctgccaacgcgagtgtggaacgaattaagaccacgtcttcaatcgaattcgctcggctccaatttacctacaaccacattcaacgccacgttaacgatatgctgggaaggattgcagttgcttggtgtgagctccagaaccacgaactgacactgtggaacgaggccagaaagcttaacccaaacgctattgcttccgcgacagttggaagaagagtgtctgcacgaatgctcggcgacgttatggctgttagtacctgtgtgcctgtggcccctgacaatgtaattgttcagaacagtatgagagtctcttctagacccggcacttgctactccaggccactggtctcttttcgctacgaggatcaggggcctttgatcgagggccagttgggagagaataacgaactgcgcctgaccagagacgctctggaaccctgtacagtcggccacagacgatattttatattcggcggcggttacgtatattttgaagagtatgcgtactcccaccaactgtccagagcagatgtgaccactgtgagcacttttatcgatctcaatatcactatgctggaggatcacgagtttgttccgttggaagtgtacactcggcacgagatcaaggacagtggcctgctcgattataccgaagtccagaggcgcaatcaactgcacgatctgagatttgccgatattgacacagtgattagggctgacgctaacgccgctatgtttgctggcctgtgtgcctttttcgagggaatgggtgatctcggaagagccgtaggcaaggtggttatgggagtcgtaggtggcgtcgttagtgccgtgtcaggggtgtctagctttatgtctaaccccttcggagctttggctgtgggtctcctggtacttgccggactggtggccgcattttttgcctttaggtacgtcctgcagctgcagaggaatccaatgaaggccctgtatccacttacaacaaaggaacttaaaacctccgatcctggaggagttggaggagaaggcgaagagggagcggaaggtggtgggtttgacgaggccaagttggctgaggcccgagagatgataaggtatatggctctcgtatctgcaatggagagaactgagcacaaagctcgcaagaagggaaccagtgccctgctgagcagcaaagtgacaaatatggtgcttcgaaaacgcaataaggctcgctactctcctctgcacaacgaggacgaagcaggggatgaggacgaactctgagcgcgcagcgcttagacgtctcgcgatcgatgctagtgtgaaatagacatcagaattaagaaaaacgtagggtccaagtggttccccgttatggactcgctatctgtcaaccagatcttataccctgaagttcacctagatagcccgatagttaccaataagatagtagccatcctggagtatgctcgagtccctcacgcttacagcctggaggaccctacactgtgtcagaacatcaagcaccgcctaaaaaacggattttccaaccaaatgattataaacaatgtggaagttgggaatgtcatcaagtccaagcttaggagttatccggcccactctcatattccatatccaaattgtaatcaggatttatttaacatagaagacaaagagtcaacgaggaagatccgtgaactcctcaaaaaggggaattcgctgtactccaaagtcagtgataaggttttccaatgcttaagggacactaactcacggcttggcctaggctccgaattgagggaggacatcaaggagaaagttattaacttgggagtttacatgcacagctcccagtggtttgagccctttctgttttggtttacagtcaagactgagatgaggtcagtgattaaatcacaaacccatacttgccataggaggagacacacacctgtattcttcactggtagttcagttgagttgctaatctctcgtgaccttgttgctataatcagtaaagagtctcaacatgtatattacctgacatttgaactggttttgatgtattgtgatgtcatagaggggaggttaatgacagagaccgctatgactattgatgctaggtatacagagcttctaggaagagtcagatacatgtggaaactgatagatggtttcttccctgcactcgggaatccaacttatcaaattgtagccatgctggagcctctttcacttgcttacctgcagctgagggatataacagtagaactcagaggtgctttccttaaccactgctttactgaaatacatgatgttcttgaccaaaacgggttttctgatgaaggtacttatcatgagttaactgaagctctagattacattttcataactgatgacatacatctgacaggggagattttctcatttttcagaagtttcggccaccccagacttgaagcagtaacggctgctgaaaatgttaggaaatacatgaatcagcctaaagtcattgtgtatgagactctgatgaaaggtcatgccatattttgtggaatcataatcaacggctatcgtgacaggcacggaggcagttggccaccgctgaccctccccctgcatgctgcagacacaatccggaatgctcaagcttcaggtgaagggttaacacatgagcagtgcgttgataactggaaatcttttgctggagtgaaatttggctgctttatgcctcttagcctggatagtgatctgacaatgtacctaaaggacaaggcacttgctgctctccaaagggaatgggattcagtttacccgaaagagttcctgcgttacgaccctcccaagggaaccgggtcacggaggcttgtagatgttttccttaatgattcgagctttgacccatatgatgtgataatgtatgttgtaagtggagcttacctccatgaccctgagttcaacctgtcttacagcctgaaagaaaaggagatcaaggaaacaggtagactttttgctaaaatgacttacaaaatgagggcatgccaagtgattgctgaaaatctaatctcaaacgggattggcaaatattttaaggacaatgggatggccaaggatgagcacgatttgactaaggcactccacactctagctgtctcaggagtccccaaagatctcaaagaaagtcacaggggggggccagtcttaaaaacctactcccgaagcccagtccacacaagtaccaggaacgtgagagcagcaaaagggtttatagggttccctcaagtaattcggcaggaccaagacactgatcatccggagaatatggaagcttacgagacagtcagtgcatttatcacgactgatctcaagaagtactgccttaattggagatatgagaccatcagcttgtttgcacagaggctaaatgagatttacggattgccctcatttttccagtggctgcataagaggcttgagacctctgtcctgtatgtaagtgaccctcattgcccccccgaccttgacgcccatatcccgttatataaagtccccaatgatcaaatcttcattaagtaccctatgggaggtatagaagggtattgtcagaagctgtggaccatcagcaccattccctatctatacctggctgcttatgagagcggagtaaggattgcttcgttagtgcaaggggacaatcagaccatagccgtaacaaaaagggtacccagcacatggccctacaaccttaagaaacgggaagctgctagagtaactagagattactttgtaattcttaggcaaaggctacatgatattggccatcacctcaaggcaaatgagacaattgtttcatcacatttttttgtctattcaaaaggaatatattatgatgggctacttgtgtcccaatcactcaagagcatcgcaagatgtgtattctggtcagagactatagttgatgaaacaagggcagcatgcagtaatattgctacaacaatggctaaaagcatcgagagaggttatgaccgttaccttgcatattccctgaacgtcctaaaagtgatacagcaaattctgatctctcttggcttcacaatcaattcaaccatgacccgggatgtagtcatacccctcctcacaaacaacgacctcttaataaggatggcactgttgcccgctcctattggggggatgaattatctgaatatgagcaggctgtttgtcagaaacatcggtgatccagtaacatcatcaattgctgatctcaagagaatgattctcgcctcactaatgcctgaagagaccctccatcaagtaatgacacaacaaccgggggactcttcattcctagactgggctagcgacccttactcagcaaatcttgtatgtgtccagagcatcactagactcctcaagaacataactgcaaggtttgtcctgatccatagtccaaacccaatgttaaaaggattattccatgatgacagtaaagaagaggacgagggactggcggcattcctcatggacaggcatattatagtacctagggcagctcatgaaatcctggatcatagtgtcacaggggcaagagagtctattgcaggcatgctggataccacaaaaggcttgattcgagccagcatgaggaagggggggttaacctctcgagtgataaccagattgtccaattatgactatgaacaattcagagcagggatggtgctattgacaggaagaaagagaaatgtcctcattgacaaagagtcatgttcagtgcagctggcgagagctctaagaagccatatgtgggcgaggctagctcgaggacggcctatttacggccttgaggtccctgatgtactagaatctatgcgaggccaccttattcggcgtcatgagacatgtgtcatctgcgagtgtggatcagtcaactacggatggttttttgtcccctcgggttgccaactggatgatattgacaaggaaacatcatccttgagagtcccatatattggttctaccactgatgagagaacagacatgaagcttgccttcgtaagagccccaagtcgatccttgcgatctgctgttagaatagcaacagtgtactcatgggcttacggtgatgatgatagctcttggaacgaagcctggttgttggctaggcaaagggccaatgtgagcctggaggagctaagggtgatcactcccatctcaacttcgactaatttagcgcataggttgagggatcgtagcactcaagtgaaatactcaggtacatcccttgtccgagtggcgaggtataccacaatctccaacgacaatctctcatttgtcatatcagataagaaggttgatactaactttatataccaacaaggaatgcttctagggttgggtgttttagaaacattgtttcgactcgagaaagataccggatcatctaacacggtattacatcttcacgtcgaaacagattgttgcgtgatcccgatgatagatcatcccaggatacccagctcccgcaagctagagctgagggcagagctatgtaccaacccattgatatatgataatgcacctttaattgacagagatgcaacaaggctatacacccagagccataggaggcaccttgtggaatttgttacatggtccacaccccaactatatcacattttagctaagtccacagcactatctatgattgacctggtaacaaaatttgagaaggaccatatgaatgaaatttcagctctcataggggatgacgatatcaatagtttcataactgagtttctgctcatagagccaagattattcactatctacttgggccagtgtgcggccatcaattgggcatttgatgtacattatcatagaccatcagggaaatatcagatgggtgagctgttgtcatcgttcctttctagaatgagcaaaggagtgtttaaggtgcttgtcaatgctctaagccacccaaagatctacaagaaattctggcattgtggtattatagagcctatccatggtccttcacttgatgctcaaaacttgcacacaactgtgtgcaacatggtttacacatgctatatgacctacctcgacctgttgttgaatgaagagttagaagagttcacatttctcttgtgtgaaagcgacgaggatgtagtaccggacagattcgacaacatccaggcaaaacacttatgtgttctggcagatttgtactgtcaaccagggacctgcccaccaattcgaggtctaagaccggtagagaaatgtgcagttctaaccgaccatatcaaggcagaggctatgttatctccagcaggatcttcgtggaacataaatccaattattgtagaccattactcatgctctctgacttatctccggcgaggatcgatcaaacagataagattgagagttgatccaggattcattttcgacgccctcgctgaggtaaatgtcagtcagccaaagatcggcagcaacaacatctcaaatatgagcatcaaggctttcagacccccacacgatgatgttgcaaaattgctcaaagatatcaacacaagcaagcacaatcttcccatttcagggggcaatctcgccaattatgaaatccatgctttccgcagaatcgggttgaactcatctgcttgctacaaagctgttgagatatcaacattaattaggagatgccttgagccaggggaggacggcttgttcttgggtgagggatcgggttctatgttgatcacttataaagagatacttaaactaaacaagtgcttctataatagtggggtttccgccaattctagatctggtcaaagggaattagcaccctatccctccgaagttggccttgtcgaacacagaatgggagtaggtaatattgtcaaagtgctctttaacgggaggcccgaagtcacgtgggtaggcagtgtagattgcttcaatttcatagttagtaatatccctacctctagtgtggggtttatccattcagatatagagaccttgcctgacaaagatactatagagaagctagaggaattggcagccatcttatcgatggctctgctcctgggcaaaataggatcaatactggtgattaagcttatgcctttcagcggggattttgttcagggatttataagttatgtagggtctcattatagagaagtgaaccttgtataccctagatacagcaacttcatctctactgaatcttatttggttatgacagatctcaaggctaaccggctaatgaatcctgaaaagattaagcagcagataattgaatcatctgtgaggacttcacctggacttataggtcacatcctatccattaagcaactaagctgcatacaagcaattgtgggagacgcagttagtagaggtgatatcaatcctactctgaaaaaacttacacctatagagcaggtgctgatcaattgcgggttggcaattaacggacctaagctgtgcaaagaattgatccaccatgatgttgcctcagggcaagatggattgcttaattctatactcatcctctacagggagttggcaagattcaaagacaaccaaagaagtcaacaagggatgttccacgcttaccccgtattggtaagtagcaggcaacgagaacttatatctaggatcacccgcaaattctgggggcacattcttctttactccgggaacaaaaagttgataaataagtttatccagaatctcaagtccggctatctgatactagacttacaccagaatatcttcgttaagaatctatccaagtcagagaaacagattattatgacggggggtttgaaacgtgagtgggtttttaaggtaacagtcaaggagaccaaagaatggtataagttagtcggatacagtgccctgattaaggactaattggttgaactccggaaccctaatcctgccctaggtggttaggcattatttgcaatatattaaagaaaactttgaaaatacgaagtttctattcccagctttgtctggt

SEQ ID NO: 64 - protein, 876 aa, synthetic construct
MRGGGLVCALVVGALVAAVASAAPAAPRASGGVAATVAANGGPASQPPPVPSPATTKARKRKTKKPPKRPEATPPPDANATVAAGHATLRAHLREIKVENADAQFYVCPPPTGATVVQFEQPRRCPTRPEGQNYTEGIAVVFKENIAPYKFKATMYYKDVTVSQVWFGHRYSQFMGIFEDRAPVPFEEVIDKINAKGVCRSTAKYVRNNMETTAFHRDDHETDMELKPAKVATRTSRGWHTTDLKYNPSRVEAFHRYGTTVNCIVEEVDARSVYPYDEFVLATGDFVYMSPFYGYREGSHTEHTSYAADRFKQVDGFYARDLTTKARATSPTTRNLLTTPKFTVAWDWVPKRPAVCTMTKWQEVDEMLRAEYGGSFRFSSDAISTTFTTNLTQYSLSRVDLGDCIGRDAREAIDRMFARKYNATHIKVGQPQYYLATGGFLIAYQPLLSNTLAELYVREYMREQDRKPRNATPAPLREAPSANASVERIKTTSSIEFARLQFTYNHIQRHVNDMLGRIAVAWCELQNHELTLWNEARKLNPNAIASATVGRRVSARMLGDVMAVSTCVPVAPDNVIVQNSMRVSSRPGTCYSRPLVSFRYEDQGPLIEGQLGENNELRLTRDALEPCTVGHRRYFIFGGGYVYFEEYAYSHQLSRADVTTVSTFIDLNITMLEDHEFVPLEVYTRHEIKDSGLLDYTEVQRRNQLHDLRFADIDTVIRADANAAMFAGLCAFFEGMGDLGRAVGKVVMGVVGGVVSAVSGVSSFMSNPFGALAVGLLVLAGLVAAFFAFRYVLQLQRNPMKALYPLTTKELKTSDPGGVGGEGEEGAEGGGFDEAKLAEAREMIRYMALVSAMERTEHKARKKGTSALLSSKVTNM

SEQ ID NO: 65 - protein, 592 aa, Human alphaherpesvirus 2
MENAVGTVCHPSLMNIDAAVGGVNHAPVEAANPYGAYVAAPAGPGADMQQRFLNAWRQRLAHGRVRWVAECQMTAEQFMQPDNANLALELHPAFDFFAGVADVELPGGEVPPAGPGAIQATWRVVNGNLPLALCPVAFRDARGLELGVGRHAMAPATIAAVRGAFEDRSYPAVFYLLQAAIHGSEHVFCALARLVTQCITSYWNNTRCAAFVNDYSLVSYIVTYLGGDLPEECMAVYRDLVAHVEALAQLVDDFTLPGPELGGQAQAELNHLMRDPALLPPLVWDCDGLMRHAALDRHRDCRIDAGGHEPVYAAACNVATADFNRNDGRLLHNTQARAADAADDRPHRPADWTVHHKIYYYVLVPAFSRGRCCTAGVRFDRVYATLQNMVVPEIAPGEECPSDPVTDPAHPLHPANLVANTVNAMFHNGRVVVDGPAMLTLQVLAHNMAERTTALLCSAAPDAGANTASTANMRIFDGALHAGVLLMAPQHLDHTIQNGEYFYVLPVHALFAGADHVANAPNFPPALRDLARHVPLVPPALGANYFSSIRQPVVQHARESAAGENALTYALMAGYFKMSPVALYHQLKTGLH

SEQ ID NO: 66 - DNA, 18780 bp, synthetic construct
  source 1..18780: mol_type = other DNA
accaaacaaagttgggtaaggatagttcaatcaatgatcatcttctagtgcacttaggattcaagatcctattatcagggacaagagcaggattagggatatccgagatggccacacttttaaggagcttagcattgttcaaaagaaacaaggacaaaccacccattacatcaggatccggtggagccatcagaggaatcaaacacattattatagtaccaatccctggagattcctcaattaccactcgatccagacttctggaccggttggtgaggttaattggaaacccggatgtgagcgggcccaaactaacaggggcactaataggtatattatccttatttgtggagtctccaggtcaattgattcagaggatcaccgatgaccctgacgttagcataaggctgttagaggttgtccagagtgaccagtcacaatctggccttaccttcgcatcaagaggtaccaacatggaggatgaggcggaccaatacttttcacatgatgatccaattagtagtgatcaatccaggttcggatggttcgggaacaaggaaatctcagatattgaagtgcaagaccctgagggattcaacatgattctgggtaccatcctagcccaaatttgggtcttgctcgcaaaggcggttacggccccagacacggcagctgattcggagctaagaaggtggataaagtacacccaacaaagaagggtagttggtgaatttagattggagagaaaatggttggatgtggtgaggaacaggattgccgaggacctctccttacgccgattcatggtcgctctaatcctggatatcaagagaacacccggaaacaaacccaggattgctgaaatgatatgtgacattgatacatatatcgtagaggcaggattagccagttttatcctgactattaagtttgggatagaaactatgtatcctgctcttggactgcatgaatttgctggtgagttatccacacttgagtccttgatgaacctttaccagcaaatgggggaaactgcaccctacatggtaatcctggagaactcaattcagaacaagttcagtgcaggatcataccctctgctctggagctatgccatgggagtaggagtggaacttgaaaactccatgggaggtttgaactttggccgatcttactttgatccagcatattttagattagggcaagagatggtaaggaggtcagctggaaaggtcagttccacattggcatctgaactcggtatcactgccgaggatgcaaggcttgtttcagagattgcaatgcatactactgaggacaagatcagtagagcggttggacccagacaagcccaagtatcatttctacacggtgatcaaagtgagaatgagctaccgagattggggggcaaggaagataggagggtcaaacagagtcgaggagaagccagggagagctacagagaaaccgggcccagcagagcaagtgatgcgagagctgcccatcttccaaccggcacacccctagacattgacactgcaacggagtccagccaagatccgcaggacagtcgaaggtcagctgacgccctgcttaggctgcaagccatggcaggaatctcggaagaacaaggctcagacacggacacccctatagtgtacaatgacagaaatcttctagactaggtgcgagaggccgagggccagaacaacatccgcctaccatccatcattgttataaaaaacttaggaaccaggtccacacagccgccagcccatcaaccatccactcccacgattggagccaatggcagaagagcaggcacgccatgtcaaaaacggactggaatgcatccgggctctcaaggccgagcccatcggctcactggccatcgaggaagctatggcagcatggtcagaaatatcagacaacccaggacaggagcgagccacctgcagggaagagaaggcaggcagttcgggtctcagcaaaccatgcctctcagcaattggatcaactgaaggcggtgcacctcgcatccgcggtcagggacctggagagagcgatgacgacgctgaaactttgggaatccccccaagaaatctccaggcatcaagcactgggttacagtgttattacgtttatgatcacagcggtgaagcggttaagggaatccaagatgctgactctatcatggttcaatcaggccttgatggtgatagcaccctctcaggaggagacaatgaatctgaaaacagcgatgtggatattggcgaacctgataccgagggatatgctatcactgaccggggatctgctcccatctctatggggttcagggcttctgatgttgaaactgcagaaggaggggagatccacgagctcctgagactccaatccagaggcaacaactttccgaagcttgggaaaactctcaatgttcctccgcccccggaccccggtagggccagcacttccgggacacccattaaaaagggcacagacgcgagattagcctcatttggaacggagatcgcgtctttattgacaggtggtgcaacccaatgtgctcgaaagtcaccctcggaaccatcagggccaggtgcacctgcggggaatgtccccgagtgtgtgagcaatgccgcactgatacaggagtggacacccgaatctggtaccacaatctccccgagatcccagaataatgaagaagggggagactattatgatgatgagctgttctctgatgtccaagatattaaaacagccttggccaaaatacacgaggataatcagaagataatctccaagctagaatcactgctgttattgaagggagaagttgagtcaattaagaagcagatcaacaggcaaaatatcagcatatccaccctggaaggacacctctcaagcatcatgatcgccattcctggacttgggaaggatcccaacgaccccactgcagatgtcgaaatcaatcccgacttgaaacccatcataggcagagattcaggccgagcactggccgaagttctcaagaaacccgttgccagccgacaactccaaggaatgacaaatggacggaccagttccagaggacagctgctgaaggaatttcagctaaagccgatcgggaaaaagatgagctcagccgtcgggtttgttcctgacaccggccctgcatcacgcagtgtaatccgctccattataaaatccagccggctagaggaggatcggaagcgttacctgatgactctccttgatgatatcaaaggagccaatgatcttgccaagttccaccagatgctgatgaagataataatgaagtagctacagctcaacttacctgccaaccccatgccagtcgacccaactagtacaacctaaatccattataaaaaacttaggagcaaagtgattgcctcccaaggtccacaatgacagagacctacgacttcgacaagtcggcatgggacatcaaagggtcgatcgctccgatacaacccaccacctacagtgatggcaggctggtgccccaggtcagagtcatagatcctggtctaggcgacaggaaggatgaatgctttatgtacatgtttctgctgggggttgttgaggacagcgattccctagggcctccaatcgggcgagcatttgggttcctgcccttaggtgttggcagatccacagcaaagcccgaaaaactcctcaaagaggccactgagcttgacatagttgttagacgtacagcagggctcaatgaaaaactggtgttctacaacaacaccccactaactctcctcacaccttggagaaaggtcctaacaacagggagtgtcttcaacgcaaaccaagtgtgcaatgcggttaatctgataccgctcgataccccgcagaggttccgtgttgtttatatgagcatcacccgtctttcggataacgggtattacaccgttcctagaagaatgctggaattcagatcggtcaatgcagtggccttcaacctgctggtgacccttaggattgacaaggcgataggccctgggaagatcatcgacaatacagagcaacttcctgaggcaacatttatggtccacatcgggaacttcaggagaaagaagagtgaagtctactctgccgattattgcaaaatgaaaatcgaaaagatgggcctggtttttgcacttggtgggatagggggcaccagtcttcacattagaagcacaggcaaaatgagcaagactctccatgcacaactcgggttcaagaagaccttatgttacccgctgatggatatcaatgaagaccttaatcgattactctggaggagcagatgcaagatagtaagaatccaggcagttttgcagccatcagttcctcaagaattccgcatttacgacgacgtgatcataaatgatgaccaaggactattcaaagttctgtagaccgtagtgcccagcaatgcccgaaaacgacccccctcacaatgacagccagaaggcccggacaaaaaagccccctccgaaagactccacggaccaagcgagaggccagccagcagccgacggcaagcgcgaacaccaggcggccccagcacagaacagccctgacacaaggccaccaccagccaccccaatctgcatcctcctcgtgggacccccgaggaccaacccccaaggctgcccccgatccaaaccaccaaccgcatccccaccacccccgggaaagaaacccccagcaattggaaggcccctccccctcttcctcaacacaagaactccacaaccgaaccgcacaagcgaccgaggtgacccaaccgcaggcatccgactccctagacagatcctctctccccggcaaactaaacaaaacttagggccaaggaacatacacacccaacagaacccagaccccggcccacggcgccgcgcccccaacccccgacaaccagagggagcccccaaccaatcccgccggctcccccggtgcccacaggcagggacaccaacccccgaacagacccagcacccaaccatcgacaatccaagacgggggggcccccccaaaaaaaggcccccaggggccgacagccagcaccgcgaggaagcccacccaccccacacacgaccacggcaaccaaaccagaacccagaccaccctgggccaccagctcccagactcggccatcaccccgcagaaaggaaaggccacaacccgcgcaccccagccccgatccggcggggagccacccaacccgaaccagcacccaagagcgatccccgaaggacccccgaaccgcaaaggacatcagtatcccacagcctctccaagtcccccggtctcctcctcttctcgaagggaccaaaagatcaatccaccacacccgacgacactcaactccccacccctaaaggagacaccgggaatcccagaatcaagactcatccaatgtccatcatgggtctcaaggtgaacgtctctgccatattcatggcagtactgttaactctccaaacacccaccggtcaaatccattggggcaatctctctaagataggggtggtaggaataggaagtgcaagctacaaagttatgactcgttccagccatcaatcattagtcataaaattaatgcccaatataactctcctcaataactgcacgagggtagagattgcagaatacaggagactactgagaacagttttggaaccaattagagatgcacttaatgcaatgacccagaatataagaccggttcagagtgtagcttcaagtaggagacacaagagatttgcgggagtagtcctggcaggtgcggccctaggcgttgccacagctgctcagataacagccggcattgcacttcaccagtccatgctgaactctcaagccatcgacaatctgagagcgagcctggaaactactaatcaggcaattgagacaatcagacaagcagggcaggagatgatattggctgttcagggtgtccaagactacatcaataatgagctgataccgtctatgaaccaactatcttgtgatttaatcggccagaagctcgggctcaaattgctcagatactatacagaaatcctgtcattatttggccccagtttacgggaccccatatctgcggagatatctatccaggctttgagctatgcgcttggaggagacatcaataaggtgttagaaaagctcggatacagtggaggtgatttactgggcatcttagagagcggaggaataaaggcccggataactcacgtcgacacagagtcctacttcattgtcctcagtatagcctatccgacgctgtccgagattaagggggtgattgtccaccggctagagggggtctcgtacaacataggctctcaagagtggtataccactgtgcccaagtatgttgcaacccaagggtaccttatctcgaattttgatgagtcatcgtgtactttcatgccagaggggactgtgtgcagccaaaatgccttgtacccgatgagtcctctgctccaagaatgcctccgggggtacaccaagtcctgtgctcgtacactcgtatccgggtcttttgggaaccggttcattttatcacaagggaacctaatagccaattgtgcatcaatcctttgcaagtgttacacaacaggaacgatcattaatcaagaccctgacaagatcctaacatacattgctgccgatcactgcccggtagtcgaggtgaacggcgtgaccatccaagtcgggagcaggaggtatccagacgctgtgtacttgcacagaattgacctcggtcctcccatatcattggagaggttggacgtagggacaaatctggggaatgcaattgctaagttggaggatgccaaggaattgttggagtcatcggaccagatattgaggagtatgaaaggtttatcgagcactagcatagtctacatcctgattgcagtgtgtcttggagggttgatagggatccccgctttaatatgttgctgcagggggcgttgtaacaaaaagggagaacaagttggtatgtcaagaccaggcctaaagcctgatcttacgggaacatcaaaatcctatgtaaggtcgctctgatcctctacaactcttgaaacacaaatgtcccacaagtctcctcttcgtcatcaagcaaccaccgcacccagcatcaagcccacctgaaattatctccggcttccctctggccgaacaatatcggtagttaatcaaaacttagggtgcaagatcatccacaatgtcaccacaacgagaccggataaatgccttctacaaagataacccccatcccaagggaagtaggatagtcattaacagagaacatcttatgattgatagaccttatgttttgctggctgttctgtttgtcatgtttctgagcttgatcgggttgctagccattgcaggcattagacttcatcgggcagccatctacaccgcagagatccataaaagcctcagcaccaatctagatgtaactaactcaatcgagcatcaggtcaaggacgtgctgacaccactcttcaaaatcatcggtgatgaagtgggcctgaggacacctcagagattcactgacctagtgaaattaatctctgacaagattaaattccttaatccggatagggagtacgacttcagagatctcacttggtgtatcaacccgccagagagaatcaaattggattatgatcaatactgtgcagatgtggctgctgaagagctcatgaatgcattggtgaactcaactctactggagaccagaacaaccaatcagttcctagctgtctcaaagggaaactgctcagggcccactacaatcagaggtcaattctcaaacatgtcgctgtccctgttagacttgtatttaggtcgaggttacaatgtgtcatctatagtcactatgacatcccagggaatgtatgggggaacttacctagtggaaaagcctaatctgagcagcaaaaggtcagagttgtcacaactgagcatgtaccgagtgtttgaagtaggtgttatcagaaatccgggtttgggggctccggtgttccatatgacaaactatcttgagcaaccagtcagtaatgatctcagcaactgtatggtggctttgggggagctcaaactcgcagccctttgtcacggggaagattctatcacaattccctatcagggatcagggaaaggtgtcagcttccagctcgtcaagctaggtgtctggaaatccccaaccgacatgcaatcctgggtccccttatcaacggatgatccagtgatagacaggctttacctctcatctcacagaggtgttatcgctgacaatcaagcaaaatgggctgtcccgacaacacgaacagatgacaagttgcgaatggagacatgcttccaacaggcgtgtaagggtaaaatccaagcactctgcgagaatcccgagtgggcaccattgaaggataacaggattccttcatacggggtcttgtctgttgatctgagtctgacagttgagcttaaaatcaaaattgcttcgggattcgggccattgatcacacacggttcagggatggacctatacaaatccaaccacaacaatgtgtattggctgactatcccgccaatgaagaacctagccttaggtgtaatcaacacattggagtggataccgagattcaaggttagtccctacctcttcactgtcccaattaaggaagcaggcgaagactgccatgccccaacatacctacctgcggaggtggatggtgatgtcaaactcagttccaatctggtgattctacctggtcaagatctccaatatgttttggcaacctacgatacttccagggttgaacatgctgtggtttattacgtttacagcccaagccgctcattttcttacttttatccttttaggttgcctataaagggggtccccatcgaattacaagtggaatgcttcacatgggaccaaaaactctggtgccgtcacttctgtgtgcttgcggactcagaatctggtggacatatcactcactctgggatggtgggcatgggagtcagctgcacagtcacccgggaagatggaaccaatcgcagatagggctgctagtgaaccaatcacatgatgtcacccagacatcaggcatacccactagtctaccctccatcattgttataaaaaacttaggaaccaggtccacacagccgccagcccatcaacgcgtacggccaccatgggtagacttacaagtggggtgggaactgccgcacttttggttgttgctgtgggcttgcgagtggtttgcgctaaatacgcactcgccgatccgtccctcaaaatggcagaccccaatcggtttcggggcaagaatttgccagtccttgaccagctgacagaccctccaggggttaagagagtgtatcacatccagccctcccttgaggaccccttccaacccccatctataccgatcaccgtgtattacgccgtgctcgaacgcgcttgcaggtctgtgttgctgcacgcaccatctgaggctccccagattgttagaggggcaagcgacgaagcgagaaagcacacttacaacctcaccatagcttggtaccgcatgggcgacaactgcgccatcccaatcactgttatggaatatactgagtgcccttacaataaatctctgggtgtgtgtcctattaggacacagcctcgctggagctactatgactccttctctgccgtgagtgaagataatttgggtttcctgatgcacgcacccgcctttgagacagcaggtacgtaccttaggcttgtaaaaatcaacgattggaccgagataacccagtttattctggagcacagggctagagcatcctgtaaatacgcgttgccactccggataccaccagccgcttgcttgacctccaaggcttatcaacagggcgtaacggtggattccatcggcatgctccctaggttcatccctgaaaatcaaagaacggtggcactgtattcactcaagattgccggctggcacggccctaagccaccatacacctctactctgctgcccccggagctgagtgataccactaacgcaacccagcctgaactggtgccagaggatcctgaagattctgcattgctggaagacccagccggcactgtgtctagtcaaattccccctaattggcacataccgagcattcaggacgttgctccacaccacgctccggctgctccaagcaatcctggcctgataataggtgcattggccggttctaccctcgccgtcctggtgattgggggtatcgccttctgggttaggaggagagctcaaatggcccccaagcgcttgaggttgccgcacataagagacgacgacgcccccccttctcaccagcctctgttttattagttcgaactacagctcaacttacctgccaaccccatgccagtcgacccaactagtacaacctaaatccattataaaaaacttaggaaccaggtccacacagccgccagcccatcaaccatccactcccacgattggaggccggccatggcattgggtagagttggtttggctgtgggactttggggtctcctctgggtcggtgtggttgtcgtactggctaacgcttctccaggccgcactattactgttggaccgagagggaacgcttccaacgctgctccctctgcctcccctaggaacgcttctgctcctagaactacacctactccaccgcaaccccgcaaagcaaccaaaagcaaggcctcaaccgctaaaccagctcctccaccgaagacaggcccacctaaaaccagcagcgagcccgtgcggtgtaatcgacacgatcccctggcccgatacggtagtcgggtgcaaatccgctgtaggtttcctaatagtactagaacagaaagcaggctgcagatctggagatacgccactgccactgacgcagaaatcgggaccgccccttcccttgaggaggtgatggtgaacgtaagcgctccaccaggaggtcagctcgtctacgactcagcacccaataggaccgatccacacgtgatttgggcagaaggagctggaccaggcgcctctccaaggttgtattccgttgtaggcccactgggtcggcagagactgattatcgaagaactgactctggaaacccagggaatgtactattgggtttggggaaggactgataggcctagtgcttacggtacttgggtgagagtcagggtatttcggcctccttccctgactatacacccacacgcagtgctcgagggtcagcctttcaaggccacttgcacagccgcaacttactaccctgggaaccgagcagagtttgtgtggtttgaagacgggcggagagtttttgaccccgcacagatccacacgcagacccaggaaaaccctgacggattctccaccgttagcactgtgacctctgccgcagttggaggacaaggaccgccaaggaccttcacctgtcagctgacctggcaccgcgactctgtttcagcgtctagacggaacgcgagcggtactgcctctgtgctccccagacccacaatcacaatggagttcaccggcgatcacgccgtgtgtacggctggttgtgtacccgaaggcgtgacctttgcttggtttttgggagacgatagctcacctgccgagaaagtcgcagtggcttcacaaacttcctgcggaaggcccgggactgccactatccgatctacgctccccgtgtcttacgagcagacagaatatatttgccgactggcaggatatccagacggaatacccgtcctggaacaccacggttctcaccagcctccaccgagagatccaaccgagcgacaggtaatcagagccgtggaaggagcgggtattggcgtggcagttctcgttgctgtcgtacttgccggcacggctgttgtgtatctcactcacgccagcagcgtgcgatacaggcgcctcagatgataagcgcgcagcgcttagacgtctcgcgatcgatgctagtgtgaaatagacatcagaattaagaaaaacgtagggtccaagtggttccccgttatggactcgctatctgtcaaccagatcttataccctgaagttcacctagatagcccgatagttaccaataagatagtagccatcctggagtatgctcgagtccctcacgcttacagcctggaggaccctacactgtgtcagaacatcaagcaccgcctaaaaaacggattttccaaccaaatgattataaacaatgtggaagttgggaatgtcatcaagtccaagcttaggagttatccggcccactctcatattccatatccaaattgtaatcaggatttatttaacatagaagacaaagagtcaacgaggaagatccgtgaactcctcaaaaaggggaattcgctgtactccaaagtcagtgataaggttttccaatgcttaagggacactaactcacggcttggcctaggctccgaattgagggaggacatcaaggagaaagttattaacttgggagtttacatgcacagctcccagtggtttgagccctttctgttttggtttacagtcaagactgagatgaggtcagtgattaaatcacaaacccatacttgccataggaggagacacacacctgtattcttcactggtagttcagttgagttgctaatctctcgtgaccttgttgctataatcagtaaagagtctcaacatgtatattacctgacatttgaactggttttgatgtattgtgatgtcatagaggggaggttaatgacagagaccgctatgactattgatgctaggtatacagagcttctaggaagagtcagatacatgtggaaactgatagatggtttcttccctgcactcgggaatccaacttatcaaattgtagccatgctggagcctctttcacttgcttacctgcagctgagggatataacagtagaactcagaggtgctttccttaaccactgctttactgaaatacatgatgttcttgaccaaaacgggttttctgatgaaggtacttatcatgagttaactgaagctctagattacattttcataactgatgacatacatctgacaggggagattttctcatttttcagaagtttcggccaccccagacttgaagcagtaacggctgctgaaaatgttaggaaatacatgaatcagcctaaagtcattgtgtatgagactctgatgaaaggtcatgccatattttgtggaatcataatcaacggctatcgtgacaggcacggaggcagttggccaccgctgaccctccccctgcatgctgcagacacaatccggaatgctcaagcttcaggtgaagggttaacacatgagcagtgcgttgataactggaaatcttttgctggagtgaaatttggctgctttatgcctcttagcctggatagtgatctgacaatgtacctaaaggacaaggcacttgctgctctccaaagggaatgggattcagtttacccgaaagagttcctgcgttacgaccctcccaagggaaccgggtcacggaggcttgtagatgttttccttaatgattcgagctttgacccatatgatgtgataatgtatgttgtaagtggagcttacctccatgaccctgagttcaacctgtcttacagcctgaaagaaaaggagatcaaggaaacaggtagactttttgctaaaatgacttacaaaatgagggcatgccaagtgattgctgaaaatctaatctcaaacgggattggcaaatattttaaggacaatgggatggccaaggatgagcacgatttgactaaggcactccacactctagctgtctcaggagtccccaaagatctcaaagaaagtcacaggggggggccagtcttaaaaacctactcccgaagcccagtccacacaagtaccaggaacgtgagagcagcaaaagggtttatagggttccctcaagtaattcggcaggaccaagacactgatcatccggagaatatggaagcttacgagacagtcagtgcatttatcacgactgatctcaagaagtactgccttaattggagatatgagaccatcagcttgtttgcacagaggctaaatgagatttacggattgccctcatttttccagtggctgcataagaggcttgagacctctgtcctgtatgtaagtgaccctcattgcccccccgaccttgacgcccatatcccgttatataaagtccccaatgatcaaatcttcattaagtaccctatgggaggtatagaagggtattgtcagaagctgtggaccatcagcaccattccctatctatacctggctgcttatgagagcggagtaaggattgcttcgttagtgcaaggggacaatcagaccatagccgtaacaaaaagggtacccagcacatggccctacaaccttaagaaacgggaagctgctagagtaactagagattactttgtaattcttaggcaaaggctacatgatattggccatcacctcaaggcaaatgagacaattgtttcatcacatttttttgtctattcaaaaggaatatattatgatgggctacttgtgtcccaatcactcaagagcatcgcaagatgtgtattctggtcagagactatagttgatgaaacaagggcagcatgcagtaatattgctacaacaatggctaaaagcatcgagagaggttatgaccgttaccttgcatattccctgaacgtcctaaaagtgatacagcaaattctgatctctcttggcttcacaatcaattcaaccatgacccgggatgtagtcatacccctcctcacaaacaacgacctcttaataaggatggcactgttgcccgctcctattggggggatgaattatctgaatatgagcaggctgtttgtcagaaacatcggtgatccagtaacatcatcaattgctgatctcaagagaatgattctcgcctcactaatgcctgaagagaccctccatcaagtaatgacacaacaaccgggggactcttcattcctagactgggctagcgacccttactcagcaaatcttgtatgtgtccagagcatcactagactcctcaagaacataactgcaaggtttgtcctgatccatagtccaaacccaatgttaaaaggattattccatgatgacagtaaagaagaggacgagggactggcggcattcctcatggacaggcatattatagtacctagggcagctcatgaaatcctggatcatagtgtcacaggggcaagagagtctattgcaggcatgctggataccacaaaaggcttgattcgagccagcatgaggaagggggggttaacctctcgagtgataaccagattgtccaattatgactatgaacaattcagagcagggatggtgctattgacaggaagaaagagaaatgtcctcattgacaaagagtcatgttcagtgcagctggcgagagctctaagaagccatatgtgggcgaggctagctcgaggacggcctatttacggccttgaggtccctgatgtactagaatctatgcgaggccaccttattcggcgtcatgagacatgtgtcatctgcgagtgtggatcagtcaactacggatggttttttgtcccctcgggttgccaactggatgatattgacaaggaaacatcatccttgagagtcccatatattggttctaccactgatgagagaacagacatgaagcttgccttcgtaagagccccaagtcgatccttgcgatctgctgttagaatagcaacagtgtactcatgggcttacggtgatgatgatagctcttggaacgaagcctggttgttggctaggcaaagggccaatgtgagcctggaggagctaagggtgatcactcccatctcaacttcgactaatttagcgcataggttgagggatcgtagcactcaagtgaaatactcaggtacatcccttgtccgagtggcgaggtataccacaatctccaacgacaatctctcatttgtcatatcagataagaaggttgatactaactttatataccaacaaggaatgcttctagggttgggtgttttagaaacattgtttcgactcgagaaagataccggatcatctaacacggtattacatcttcacgtcgaaacagattgttgcgtgatcccgatgatagatcatcccaggatacccagctcccgcaagctagagctgagggcagagctatgtaccaacccattgatatatgataatgcacctttaattgacagagatgcaacaaggctatacacccagagccataggaggcaccttgtggaatttgttacatggtccacaccccaactatatcacattttagctaagtccacagcactatctatgattgacctggtaacaaaatttgagaaggaccatatgaatgaaatttcagctctcataggggatgacgatatcaatagtttcataactgagtttctgctcatagagccaagattattcactatctacttgggccagtgtgcggccatcaattgggcatttgatgtacattatcatagaccatcagggaaatatcagatgggtgagctgttgtcatcgttcctttctagaatgagcaaaggagtgtttaaggtgcttgtcaatgctctaagccacccaaagatctacaagaaattctggcattgtggtattatagagcctatccatggtccttcacttgatgctcaaaacttgcacacaactgtgtgcaacatggtttacacatgctatatgacctacctcgacctgttgttgaatgaagagttagaagagttcacatttctcttgtgtgaaagcgacgaggatgtagtaccggacagattcgacaacatccaggcaaaacacttatgtgttctggcagatttgtactgtcaaccagggacctgcccaccaattcgaggtctaagaccggtagagaaatgtgcagttctaaccgaccatatcaaggcagaggctatgttatctccagcaggatcttcgtggaacataaatccaattattgtagaccattactcatgctctctgacttatctccggcgaggatcgatcaaacagataagattgagagttgatccaggattcattttcgacgccctcgctgaggtaaatgtcagtcagccaaagatcggcagcaacaacatctcaaatatgagcatcaaggctttcagacccccacacgatgatgttgcaaaattgctcaaagatatcaacacaagcaagcacaatcttcccatttcagggggcaatctcgccaattatgaaatccatgctttccgcagaatcgggttgaactcatctgcttgctacaaagctgttgagatatcaacattaattaggagatgccttgagccaggggaggacggcttgttcttgggtgagggatcgggttctatgttgatcacttataaagagatacttaaactaaacaagtgcttctataatagtggggtttccgccaattctagatctggtcaaagggaattagcaccctatccctccgaagttggccttgtcgaacacagaatgggagtaggtaatattgtcaaagtgctctttaacgggaggcccgaagtcacgtgggtaggcagtgtagattgcttcaatttcatagttagtaatatccctacctctagtgtggggtttatccattcagatatagagaccttgcctgacaaagatactatagagaagctagaggaattggcagccatcttatcgatggctctgctcctgggcaaaataggatcaatactggtgattaagcttatgcctttcagcggggattttgttcagggatttataagttatgtagggtctcattatagagaagtgaaccttgtataccctagatacagcaacttcatctctactgaatcttatttggttatgacagatctcaaggctaaccggctaatgaatcctgaaaagattaagcagcagataattgaatcatctgtgaggacttcacctggacttataggtcacatcctatccattaagcaactaagctgcatacaagcaattgtgggagacgcagttagtagaggtgatatcaatcctactctgaaaaaacttacacctatagagcaggtgctgatcaattgcgggttggcaattaacggacctaagctgtgcaaagaattgatccaccatgatgttgcctcagggcaagatggattgcttaattctatactcatcctctacagggagttggcaagattcaaagacaaccaaagaagtcaacaagggatgttccacgcttaccccgtattggtaagtagcaggcaacgagaacttatatctaggatcacccgcaaattctgggggcacattcttctttactccgggaacaaaaagttgataaataagtttatccagaatctcaagtccggctatctgatactagacttacaccagaatatcttcgttaagaatctatccaagtcagagaaacagattattatgacggggggtttgaaacgtgagtgggtttttaaggtaacagtcaaggagaccaaagaatggtataagttagtcggatacagtgccctgattaaggactaattggttgaactccggaaccctaatcctgccctaggtggttaggcattatttgcaatatattaaagaaaactttgaaaatacgaagtttctattcccagctttgtctggt

SEQ ID NO: 67 - DNA, 20640 bp, synthetic construct
  source 1..20640: mol_type = other DNA
accaaacaaagttgggtaaggatagttcaatcaatgatcatcttctagtgcacttaggattcaagatcctattatcagggacaagagcaggattagggatatccgagatggccacacttttaaggagcttagcattgttcaaaagaaacaaggacaaaccacccattacatcaggatccggtggagccatcagaggaatcaaacacattattatagtaccaatccctggagattcctcaattaccactcgatccagacttctggaccggttggtgaggttaattggaaacccggatgtgagcgggcccaaactaacaggggcactaataggtatattatccttatttgtggagtctccaggtcaattgattcagaggatcaccgatgaccctgacgttagcataaggctgttagaggttgtccagagtgaccagtcacaatctggccttaccttcgcatcaagaggtaccaacatggaggatgaggcggaccaatacttttcacatgatgatccaattagtagtgatcaatccaggttcggatggttcgggaacaaggaaatctcagatattgaagtgcaagaccctgagggattcaacatgattctgggtaccatcctagcccaaatttgggtcttgctcgcaaaggcggttacggccccagacacggcagctgattcggagctaagaaggtggataaagtacacccaacaaagaagggtagttggtgaatttagattggagagaaaatggttggatgtggtgaggaacaggattgccgaggacctctccttacgccgattcatggtcgctctaatcctggatatcaagagaacacccggaaacaaacccaggattgctgaaatgatatgtgacattgatacatatatcgtagaggcaggattagccagttttatcctgactattaagtttgggatagaaactatgtatcctgctcttggactgcatgaatttgctggtgagttatccacacttgagtccttgatgaacctttaccagcaaatgggggaaactgcaccctacatggtaatcctggagaactcaattcagaacaagttcagtgcaggatcataccctctgctctggagctatgccatgggagtaggagtggaacttgaaaactccatgggaggtttgaactttggccgatcttactttgatccagcatattttagattagggcaagagatggtaaggaggtcagctggaaaggtcagttccacattggcatctgaactcggtatcactgccgaggatgcaaggcttgtttcagagattgcaatgcatactactgaggacaagatcagtagagcggttggacccagacaagcccaagtatcatttctacacggtgatcaaagtgagaatgagctaccgagattggggggcaaggaagataggagggtcaaacagagtcgaggagaagccagggagagctacagagaaaccgggcccagcagagcaagtgatgcgagagctgcccatcttccaaccggcacacccctagacattgacactgcaacggagtccagccaagatccgcaggacagtcgaaggtcagctgacgccctgcttaggctgcaagccatggcaggaatctcggaagaacaaggctcagacacggacacccctatagtgtacaatgacagaaatcttctagactaggtgcgagaggccgagggccagaacaacatccgcctaccatccatcattgttataaaaaacttaggaaccaggtccacacagccgccagcccatcaaccatccactcccacgattggagccaatggcagaagagcaggcacgccatgtcaaaaacggactggaatgcatccgggctctcaaggccgagcccatcggctcactggccatcgaggaagctatggcagcatggtcagaaatatcagacaacccaggacaggagcgagccacctgcagggaagagaaggcaggcagttcgggtctcagcaaaccatgcctctcagcaattggatcaactgaaggcggtgcacctcgcatccgcggtcagggacctggagagagcgatgacgacgctgaaactttgggaatccccccaagaaatctccaggcatcaagcactgggttacagtgttattacgtttatgatcacagcggtgaagcggttaagggaatccaagatgctgactctatcatggttcaatcaggccttgatggtgatagcaccctctcaggaggagacaatgaatctgaaaacagcgatgtggatattggcgaacctgataccgagggatatgctatcactgaccggggatctgctcccatctctatggggttcagggcttctgatgttgaaactgcagaaggaggggagatccacgagctcctgagactccaatccagaggcaacaactttccgaagcttgggaaaactctcaatgttcctccgcccccggaccccggtagggccagcacttccgggacacccattaaaaagggcacagacgcgagattagcctcatttggaacggagatcgcgtctttattgacaggtggtgcaacccaatgtgctcgaaagtcaccctcggaaccatcagggccaggtgcacctgcggggaatgtccccgagtgtgtgagcaatgccgcactgatacaggagtggacacccgaatctggtaccacaatctccccgagatcccagaataatgaagaagggggagactattatgatgatgagctgttctctgatgtccaagatattaaaacagccttggccaaaatacacgaggataatcagaagataatctccaagctagaatcactgctgttattgaagggagaagttgagtcaattaagaagcagatcaacaggcaaaatatcagcatatccaccctggaaggacacctctcaagcatcatgatcgccattcctggacttgggaaggatcccaacgaccccactgcagatgtcgaaatcaatcccgacttgaaacccatcataggcagagattcaggccgagcactggccgaagttctcaagaaacccgttgccagccgacaactccaaggaatgacaaatggacggaccagttccagaggacagctgctgaaggaatttcagctaaagccgatcgggaaaaagatgagctcagccgtcgggtttgttcctgacaccggccctgcatcacgcagtgtaatccgctccattataaaatccagccggctagaggaggatcggaagcgttacctgatgactctccttgatgatatcaaaggagccaatgatcttgccaagttccaccagatgctgatgaagataataatgaagtagctacagctcaacttacctgccaaccccatgccagtcgacccaactagtacaacctaaatccattataaaaaacttaggagcaaagtgattgcctcccaaggtccacaatgacagagacctacgacttcgacaagtcggcatgggacatcaaagggtcgatcgctccgatacaacccaccacctacagtgatggcaggctggtgccccaggtcagagtcatagatcctggtctaggcgacaggaaggatgaatgctttatgtacatgtttctgctgggggttgttgaggacagcgattccctagggcctccaatcgggcgagcatttgggttcctgcccttaggtgttggcagatccacagcaaagcccgaaaaactcctcaaagaggccactgagcttgacatagttgttagacgtacagcagggctcaatgaaaaactggtgttctacaacaacaccccactaactctcctcacaccttggagaaaggtcctaacaacagggagtgtcttcaacgcaaaccaagtgtgcaatgcggttaatctgataccgctcgataccccgcagaggttccgtgttgtttatatgagcatcacccgtctttcggataacgggtattacaccgttcctagaagaatgctggaattcagatcggtcaatgcagtggccttcaacctgctggtgacccttaggattgacaaggcgataggccctgggaagatcatcgacaatacagagcaacttcctgaggcaacatttatggtccacatcgggaacttcaggagaaagaagagtgaagtctactctgccgattattgcaaaatgaaaatcgaaaagatgggcctggtttttgcacttggtgggatagggggcaccagtcttcacattagaagcacaggcaaaatgagcaagactctccatgcacaactcgggttcaagaagaccttatgttacccgctgatggatatcaatgaagaccttaatcgattactctggaggagcagatgcaagatagtaagaatccaggcagttttgcagccatcagttcctcaagaattccgcatttacgacgacgtgatcataaatgatgaccaaggactattcaaagttctgtagaccgtagtgcccagcaatgcccgaaaacgacccccctcacaatgacagccagaaggcccggacaaaaaagccccctccgaaagactccacggaccaagcgagaggccagccagcagccgacggcaagcgcgaacaccaggcggccccagcacagaacagccctgacacaaggccaccaccagccaccccaatctgcatcctcctcgtgggacccccgaggaccaacccccaaggctgcccccgatccaaaccaccaaccgcatccccaccacccccgggaaagaaacccccagcaattggaaggcccctccccctcttcctcaacacaagaactccacaaccgaaccgcacaagcgaccgaggtgacccaaccgcaggcatccgactccctagacagatcctctctccccggcaaactaaacaaaacttagggccaaggaacatacacacccaacagaacccagaccccggcccacggcgccgcgcccccaacccccgacaaccagagggagcccccaaccaatcccgccggctcccccggtgcccacaggcagggacaccaacccccgaacagacccagcacccaaccatcgacaatccaagacgggggggcccccccaaaaaaaggcccccaggggccgacagccagcaccgcgaggaagcccacccaccccacacacgaccacggcaaccaaaccagaacccagaccaccctgggccaccagctcccagactcggccatcaccccgcagaaaggaaaggccacaacccgcgcaccccagccccgatccggcggggagccacccaacccgaaccagcacccaagagcgatccccgaaggacccccgaaccgcaaaggacatcagtatcccacagcctctccaagtcccccggtctcctcctcttctcgaagggaccaaaagatcaatccaccacacccgacgacactcaactccccacccctaaaggagacaccgggaatcccagaatcaagactcatccaatgtccatcatgggtctcaaggtgaacgtctctgccatattcatggcagtactgttaactctccaaacacccaccggtcaaatccattggggcaatctctctaagataggggtggtaggaataggaagtgcaagctacaaagttatgactcgttccagccatcaatcattagtcataaaattaatgcccaatataactctcctcaataactgcacgagggtagagattgcagaatacaggagactactgagaacagttttggaaccaattagagatgcacttaatgcaatgacccagaatataagaccggttcagagtgtagcttcaagtaggagacacaagagatttgcgggagtagtcctggcaggtgcggccctaggcgttgccacagctgctcagataacagccggcattgcacttcaccagtccatgctgaactctcaagccatcgacaatctgagagcgagcctggaaactactaatcaggcaattgagacaatcagacaagcagggcaggagatgatattggctgttcagggtgtccaagactacatcaataatgagctgataccgtctatgaaccaactatcttgtgatttaatcggccagaagctcgggctcaaattgctcagatactatacagaaatcctgtcattatttggccccagtttacgggaccccatatctgcggagatatctatccaggctttgagctatgcgcttggaggagacatcaataaggtgttagaaaagctcggatacagtggaggtgatttactgggcatcttagagagcggaggaataaaggcccggataactcacgtcgacacagagtcctacttcattgtcctcagtatagcctatccgacgctgtccgagattaagggggtgattgtccaccggctagagggggtctcgtacaacataggctctcaagagtggtataccactgtgcccaagtatgttgcaacccaagggtaccttatctcgaattttgatgagtcatcgtgtactttcatgccagaggggactgtgtgcagccaaaatgccttgtacccgatgagtcctctgctccaagaatgcctccgggggtacaccaagtcctgtgctcgtacactcgtatccgggtcttttgggaaccggttcattttatcacaagggaacctaatagccaattgtgcatcaatcctttgcaagtgttacacaacaggaacgatcattaatcaagaccctgacaagatcctaacatacattgctgccgatcactgcccggtagtcgaggtgaacggcgtgaccatccaagtcgggagcaggaggtatccagacgctgtgtacttgcacagaattgacctcggtcctcccatatcattggagaggttggacgtagggacaaatctggggaatgcaattgctaagttggaggatgccaaggaattgttggagtcatcggaccagatattgaggagtatgaaaggtttatcgagcactagcatagtctacatcctgattgcagtgtgtcttggagggttgatagggatccccgctttaatatgttgctgcagggggcgttgtaacaaaaagggagaacaagttggtatgtcaagaccaggcctaaagcctgatcttacgggaacatcaaaatcctatgtaaggtcgctctgatcctctacaactcttgaaacacaaatgtcccacaagtctcctcttcgtcatcaagcaaccaccgcacccagcatcaagcccacctgaaattatctccggcttccctctggccgaacaatatcggtagttaatcaaaacttagggtgcaagatcatccacaatgtcaccacaacgagaccggataaatgccttctacaaagataacccccatcccaagggaagtaggatagtcattaacagagaacatcttatgattgatagaccttatgttttgctggctgttctgtttgtcatgtttctgagcttgatcgggttgctagccattgcaggcattagacttcatcgggcagccatctacaccgcagagatccataaaagcctcagcaccaatctagatgtaactaactcaatcgagcatcaggtcaaggacgtgctgacaccactcttcaaaatcatcggtgatgaagtgggcctgaggacacctcagagattcactgacctagtgaaattaatctctgacaagattaaattccttaatccggatagggagtacgacttcagagatctcacttggtgtatcaacccgccagagagaatcaaattggattatgatcaatactgtgcagatgtggctgctgaagagctcatgaatgcattggtgaactcaactctactggagaccagaacaaccaatcagttcctagctgtctcaaagggaaactgctcagggcccactacaatcagaggtcaattctcaaacatgtcgctgtccctgttagacttgtatttaggtcgaggttacaatgtgtcatctatagtcactatgacatcccagggaatgtatgggggaacttacctagtggaaaagcctaatctgagcagcaaaaggtcagagttgtcacaactgagcatgtaccgagtgtttgaagtaggtgttatcagaaatccgggtttgggggctccggtgttccatatgacaaactatcttgagcaaccagtcagtaatgatctcagcaactgtatggtggctttgggggagctcaaactcgcagccctttgtcacggggaagattctatcacaattccctatcagggatcagggaaaggtgtcagcttccagctcgtcaagctaggtgtctggaaatccccaaccgacatgcaatcctgggtccccttatcaacggatgatccagtgatagacaggctttacctctcatctcacagaggtgttatcgctgacaatcaagcaaaatgggctgtcccgacaacacgaacagatgacaagttgcgaatggagacatgcttccaacaggcgtgtaagggtaaaatccaagcactctgcgagaatcccgagtgggcaccattgaaggataacaggattccttcatacggggtcttgtctgttgatctgagtctgacagttgagcttaaaatcaaaattgcttcgggattcgggccattgatcacacacggttcagggatggacctatacaaatccaaccacaacaatgtgtattggctgactatcccgccaatgaagaacctagccttaggtgtaatcaacacattggagtggataccgagattcaaggttagtccctacctcttcactgtcccaattaaggaagcaggcgaagactgccatgccccaacatacctacctgcggaggtggatggtgatgtcaaactcagttccaatctggtgattctacctggtcaagatctccaatatgttttggcaacctacgatacttccagggttgaacatgctgtggtttattacgtttacagcccaagccgctcattttcttacttttatccttttaggttgcctataaagggggtccccatcgaattacaagtggaatgcttcacatgggaccaaaaactctggtgccgtcacttctgtgtgcttgcggactcagaatctggtggacatatcactcactctgggatggtgggcatgggagtcagctgcacagtcacccgggaagatggaaccaatcgcagatagggctgctagtgaaccaatcacatgatgtcacccagacatcaggcatacccactagtctaccctccatcattgttataaaaaacttaggaaccaggtccacacagccgccagcccatcaacgcgtacggccaccatgaggggaggaggccttgtctgtgcacttgttgtaggagctttggtcgccgccgtagctagtgcagctccagcagcaccaagggcttcaggaggggttgcagctactgttgctgctaacggaggacctgctagccaaccacctccggtgccttctccggctactaccaaagcccgcaagcgaaaaacaaagaagcccccaaagaggccagaggccacacctccacccgacgctaacgctactgtggcggctggacacgctactttgagagcccacctgcgggaaatcaaggttgagaacgcagacgcacaattctacgtttgtcccccccctacaggtgcaacagtcgtgcagtttgagcagccaagacgctgtcctactaggcctgagggacaaaattacaccgagggtatcgccgtagtttttaaggagaatatcgcaccctataagtttaaagcgacaatgtactataaggatgtgaccgtcagccaagtctggtttggtcaccgatacagtcagtttatgggaatctttgaggaccgggccccggtccctttcgaagaagtgatcgacaagattaacgccaagggagtgtgcaggtcaaccgcaaagtacgtccgaaacaatatggaaacaaccgccttccacagggacgaccacgaaacagatatggagcttaagccggctaaagtggccactcgcacgtcaagaggttggcataccacggacctgaaatataacccttctagagttgaagctttccaccggtatgggaccacggtgaactgtattgtggaagaagtggacgccagatccgtgtacccctacgacgaattcgttcttgctacaggcgatttcgtgtatatgtctcctttctacggctacagggagggctcccacaccgagcacacctcctacgccgcagatagatttaaacaggtggacggcttctacgctcgcgatctgactactaaggcacgggcaacaagcccaacaactcgcaatttgctgaccacaccaaagtttactgtggcctgggactgggtacccaagaggcctgctgtttgcacaatgaccaaatggcaggaggttgacgagatgctccgggccgaatatggaggatcctttagattctcttctgacgctatcagtaccaccttcaccacaaatctgactcagtactctctgtctcgcgtagatctgggagactgtatcggtagggacgcacgcgaggctatagatcggatgttcgcccggaaatacaacgccacccacattaaagtggggcagccccagtattacttggctactgggggcttccttatcgcttatcagcctctgctctcaaataccctggcggagctttatgtacgcgagtatatgagggagcaggacaggaagccacgcaacgctaccccagcacccctgagagaagcgccttctgccaacgcgagtgtggaacgaattaagaccacgtcttcaatcgaattcgctcggctccaatttacctacaaccacattcaacgccacgttaacgatatgctgggaaggattgcagttgcttggtgtgagctccagaaccacgaactgacactgtggaacgaggccagaaagcttaacccaaacgctattgcttccgcgacagttggaagaagagtgtctgcacgaatgctcggcgacgttatggctgttagtacctgtgtgcctgtggcccctgacaatgtaattgttcagaacagtatgagagtctcttctagacccggcacttgctactccaggccactggtctcttttcgctacgaggatcaggggcctttgatcgagggccagttgggagagaataacgaactgcgcctgaccagagacgctctggaaccctgtacagtcggccacagacgatattttatattcggcggcggttacgtatattttgaagagtatgcgtactcccaccaactgtccagagcagatgtgaccactgtgagcacttttatcgatctcaatatcactatgctggaggatcacgagtttgttccgttggaagtgtacactcggcacgagatcaaggacagtggcctgctcgattataccgaagtccagaggcgcaatcaactgcacgatctgagatttgccgatattgacacagtgattagggctgacgctaacgccgctatgtttgctggcctgtgtgcctttttcgagggaatgggtgatctcggaagagccgtaggcaaggtggttatgggagtcgtaggtggcgtcgttagtgccgtgtcaggggtgtctagctttatgtctaaccccttcggagctttggctgtgggtctcctggtacttgccggactggtggccgcattttttgcctttaggtacgtcctgcagctgcagaggaatccaatgaaggccctgtatccacttacaacaaaggaacttaaaacctccgatcctggaggagttggaggagaaggcgaagagggagcggaaggtggtgggtttgacgaggccaagttggctgaggcccgagagatgataaggtatatggctctcgtatctgcaatggagagaactgagcacaaagctcgcaagaagggaaccagtgccctgctgagcagcaaagtgacaaatatggtgcttcgaaaacgcaataaggctcgctactctcctctgcacaacgaggacgaagcaggggacgaggacgaactctgattcgaactacagctcaacttacctgccaaccccatgccagtcgacccaactagtacaacctaaatccattataaaaaacttaggaaccaggtccacacagccgccagcccatcaaccatccactcccacgattggaggccggccatggagaacgctgtaggaaccgtgtgccatccttccctgatgaacatcgatgcagctgtgggtggagtgaaccacgctcccgttgaggccgcaaatccatacggcgcatatgtagctgcacctgctggccctggggcagatatgcagcaaaggttcctcaacgcatggcggcagcgcttggcccatggcagagttaggtgggttgcagaatgccaaatgactgcggaacagttcatgcagcctgacaacgcaaaccttgctcttgagcttcatcccgcgtttgacttttttgcaggagttgccgacgtcgaattgccaggtggcgaagtccctcctgctggacctggagctattcaggcaacttggagggtggttaacggcaatctgccactggcgctgtgtcctgttgcttttcgggacgccaggggactggaactgggagtaggccgacacgcgatggcacctgcaactatagccgcagtacgcggggcattcgaggatagaagctacccagccgtgttctatctgttgcaggccgctattcacggcagcgaacacgtattctgcgctctggcacggctggtcacccagtgtatcacctcctactggaacaatactcgctgtgctgctttcgtgaacgactatagcctggtctcctacatagtgacatacctgggcggagacctgccagaagagtgcatggccgtatatcgcgatttggtggctcacgtggaggcactcgcacaacttgtggacgactttacactgcctggacctgagcttggaggccaagctcaggccgagcttaatcatctgatgagagatcccgctctgctgcctccattggtctgggattgcgatggattgatgagacacgctgcacttgaccgccatcgggattgtcgcattgacgcgggcggacacgaaccagtgtatgctgctgcttgcaacgtagccacggccgacttcaaccggaacgacggacgactgctccacaacactcaagcgagggctgcagacgctgcggacgatagaccgcatagacccgccgattggaccgtgcaccacaagatctactactacgtgcttgtaccggccttttcaagaggcaggtgttgtaccgcgggtgtcaggtttgatcgggtatacgccactctgcagaacatggtggttccagaaattgcacccggcgaagaatgtccaagtgatcccgtgaccgatcctgcacacccactccaccctgctaatctggtagcaaacacagtgaacgctatgttccataacggacgggttgtagtggatgggccagcgatgttgaccctgcaggttctcgcccacaacatggcagagagaaccacggcacttctgtgttctgctgctccagacgctggagctaatacggcatctaccgcgaatatgcgaatatttgacggagctttgcatgctggcgtgctgttgatggctccacagcacttggatcatacaatccaaaacggggagtatttttacgtgcttccggttcacgccctctttgccggtgccgatcatgtggcaaatgcccccaattttccaccggccttgagagatcttgcaaggcacgtgcctcttgtgcctcccgctcttggcgctaattacttttcaagtattaggcaacctgtagtgcagcacgcacgagagtctgcagcaggcgaaaacgcccttacatacgccttgatggctggttattttaaaatgtctccagtggccctgtatcatcaacttaaaaccgggctgcactgataagcgcgcagcgcttagacgtctcgcgatcgatgctagtgtgaaatagacatcagaattaagaaaaacgtagggtccaagtggttccccgttatggactcgctatctgtcaaccagatcttataccctgaagttcacctagatagcccgatagttaccaataagatagtagccatcctggagtatgctcgagtccctcacgcttacagcctggaggaccctacactgtgtcagaacatcaagcaccgcctaaaaaacggattttccaaccaaatgattataaacaatgtggaagttgggaatgtcatcaagtccaagcttaggagttatccggcccactctcatattccatatccaaattgtaatcaggatttatttaacatagaagacaaagagtcaacgaggaagatccgtgaactcctcaaaaaggggaattcgctgtactccaaagtcagtgataaggttttccaatgcttaagggacactaactcacggcttggcctaggctccgaattgagggaggacatcaaggagaaagttattaacttgggagtttacatgcacagctcccagtggtttgagccctttctgttttggtttacagtcaagactgagatgaggtcagtgattaaatcacaaacccatacttgccataggaggagacacacacctgtattcttcactggtagttcagttgagttgctaatctctcgtgaccttgttgctataatcagtaaagagtctcaacatgtatattacctgacatttgaactggttttgatgtattgtgatgtcatagaggggaggttaatgacagagaccgctatgactattgatgctaggtatacagagcttctaggaagagtcagatacatgtggaaactgatagatggtttcttccctgcactcgggaatccaacttatcaaattgtagccatgctggagcctctttcacttgcttacctgcagctgagggatataacagtagaactcagaggtgctttccttaaccactgctttactgaaatacatgatgttcttgaccaaaacgggttttctgatgaaggtacttatcatgagttaactgaagctctagattacattttcataactgatgacatacatctgacaggggagattttctcatttttcagaagtttcggccaccccagacttgaagcagtaacggctgctgaaaatgttaggaaatacatgaatcagcctaaagtcattgtgtatgagactctgatgaaaggtcatgccatattttgtggaatcataatcaacggctatcgtgacaggcacggaggcagttggccaccgctgaccctccccctgcatgctgcagacacaatccggaatgctcaagcttcaggtgaagggttaacacatgagcagtgcgttgataactggaaatcttttgctggagtgaaatttggctgctttatgcctcttagcctggatagtgatctgacaatgtacctaaaggacaaggcacttgctgctctccaaagggaatgggattcagtttacccgaaagagttcctgcgttacgaccctcccaagggaaccgggtcacggaggcttgtagatgttttccttaatgattcgagctttgacccatatgatgtgataatgtatgttgtaagtggagcttacctccatgaccctgagttcaacctgtcttacagcctgaaagaaaaggagatcaaggaaacaggtagactttttgctaaaatgacttacaaaatgagggcatgccaagtgattgctgaaaatctaatctcaaacgggattggcaaatattttaaggacaatgggatggccaaggatgagcacgatttgactaaggcactccacactctagctgtctcaggagtccccaaagatctcaaagaaagtcacaggggggggccagtcttaaaaacctactcccgaagcccagtccacacaagtaccaggaacgtgagagcagcaaaagggtttatagggttccctcaagtaattcggcaggaccaagacactgatcatccggagaatatggaagcttacgagacagtcagtgcatttatcacgactgatctcaagaagtactgccttaattggagatatgagaccatcagcttgtttgcacagaggctaaatgagatttacggattgccctcatttttccagtggctgcataagaggcttgagacctctgtcctgtatgtaagtgaccctcattgcccccccgaccttgacgcccatatcccgttatataaagtccccaatgatcaaatcttcattaagtaccctatgggaggtatagaagggtattgtcagaagctgtggaccatcagcaccattccctatctatacctggctgcttatgagagcggagtaaggattgcttcgttagtgcaaggggacaatcagaccatagccgtaacaaaaagggtacccagcacatggccctacaaccttaagaaacgggaagctgctagagtaactagagattactttgtaattcttaggcaaaggctacatgatattggccatcacctcaaggcaaatgagacaattgtttcatcacatttttttgtctattcaaaaggaatatattatgatgggctacttgtgtcccaatcactcaagagcatcgcaagatgtgtattctggtcagagactatagttgatgaaacaagggcagcatgcagtaatattgctacaacaatggctaaaagcatcgagagaggttatgaccgttaccttgcatattccctgaacgtcctaaaagtgatacagcaaattctgatctctcttggcttcacaatcaattcaaccatgacccgggatgtagtcatacccctcctcacaaacaacgacctcttaataaggatggcactgttgcccgctcctattggggggatgaattatctgaatatgagcaggctgtttgtcagaaacatcggtgatccagtaacatcatcaattgctgatctcaagagaatgattctcgcctcactaatgcctgaagagaccctccatcaagtaatgacacaacaaccgggggactcttcattcctagactgggctagcgacccttactcagcaaatcttgtatgtgtccagagcatcactagactcctcaagaacataactgcaaggtttgtcctgatccatagtccaaacccaatgttaaaaggattattccatgatgacagtaaagaagaggacgagggactggcggcattcctcatggacaggcatattatagtacctagggcagctcatgaaatcctggatcatagtgtcacaggggcaagagagtctattgcaggcatgctggataccacaaaaggcttgattcgagccagcatgaggaagggggggttaacctctcgagtgataaccagattgtccaattatgactatgaacaattcagagcagggatggtgctattgacaggaagaaagagaaatgtcctcattgacaaagagtcatgttcagtgcagctggcgagagctctaagaagccatatgtgggcgaggctagctcgaggacggcctatttacggccttgaggtccctgatgtactagaatctatgcgaggccaccttattcggcgtcatgagacatgtgtcatctgcgagtgtggatcagtcaactacggatggttttttgtcccctcgggttgccaactggatgatattgacaaggaaacatcatccttgagagtcccatatattggttctaccactgatgagagaacagacatgaagcttgccttcgtaagagccccaagtcgatccttgcgatctgctgttagaatagcaacagtgtactcatgggcttacggtgatgatgatagctcttggaacgaagcctggttgttggctaggcaaagggccaatgtgagcctggaggagctaagggtgatcactcccatctcaacttcgactaatttagcgcataggttgagggatcgtagcactcaagtgaaatactcaggtacatcccttgtccgagtggcgaggtataccacaatctccaacgacaatctctcatttgtcatatcagataagaaggttgatactaactttatataccaacaaggaatgcttctagggttgggtgttttagaaacattgtttcgactcgagaaagataccggatcatctaacacggtattacatcttcacgtcgaaacagattgttgcgtgatcccgatgatagatcatcccaggatacccagctcccgcaagctagagctgagggcagagctatgtaccaacccattgatatatgataatgcacctttaattgacagagatgcaacaaggctatacacccagagccataggaggcaccttgtggaatttgttacatggtccacaccccaactatatcacattttagctaagtccacagcactatctatgattgacctggtaacaaaatttgagaaggaccatatgaatgaaatttcagctctcataggggatgacgatatcaatagtttcataactgagtttctgctcatagagccaagattattcactatctacttgggccagtgtgcggccatcaattgggcatttgatgtacattatcatagaccatcagggaaatatcagatgggtgagctgttgtcatcgttcctttctagaatgagcaaaggagtgtttaaggtgcttgtcaatgctctaagccacccaaagatctacaagaaattctggcattgtggtattatagagcctatccatggtccttcacttgatgctcaaaacttgcacacaactgtgtgcaacatggtttacacatgctatatgacctacctcgacctgttgttgaatgaagagttagaagagttcacatttctcttgtgtgaaagcgacgaggatgtagtaccggacagattcgacaacatccaggcaaaacacttatgtgttctggcagatttgtactgtcaaccagggacctgcccaccaattcgaggtctaagaccggtagagaaatgtgcagttctaaccgaccatatcaaggcagaggctatgttatctccagcaggatcttcgtggaacataaatccaattattgtagaccattactcatgctctctgacttatctccggcgaggatcgatcaaacagataagattgagagttgatccaggattcattttcgacgccctcgctgaggtaaatgtcagtcagccaaagatcggcagcaacaacatctcaaatatgagcatcaaggctttcagacccccacacgatgatgttgcaaaattgctcaaagatatcaacacaagcaagcacaatcttcccatttcagggggcaatctcgccaattatgaaatccatgctttccgcagaatcgggttgaactcatctgcttgctacaaagctgttgagatatcaacattaattaggagatgccttgagccaggggaggacggcttgttcttgggtgagggatcgggttctatgttgatcacttataaagagatacttaaactaaacaagtgcttctataatagtggggtttccgccaattctagatctggtcaaagggaattagcaccctatccctccgaagttggccttgtcgaacacagaatgggagtaggtaatattgtcaaagtgctctttaacgggaggcccgaagtcacgtgggtaggcagtgtagattgcttcaatttcatagttagtaatatccctacctctagtgtggggtttatccattcagatatagagaccttgcctgacaaagatactatagagaagctagaggaattggcagccatcttatcgatggctctgctcctgggcaaaataggatcaatactggtgattaagcttatgcctttcagcggggattttgttcagggatttataagttatgtagggtctcattatagagaagtgaaccttgtataccctagatacagcaacttcatctctactgaatcttatttggttatgacagatctcaaggctaaccggctaatgaatcctgaaaagattaagcagcagataattgaatcatctgtgaggacttcacctggacttataggtcacatcctatccattaagcaactaagctgcatacaagcaattgtgggagacgcagttagtagaggtgatatcaatcctactctgaaaaaacttacacctatagagcaggtgctgatcaattgcgggttggcaattaacggacctaagctgtgcaaagaattgatccaccatgatgttgcctcagggcaagatggattgcttaattctatactcatcctctacagggagttggcaagattcaaagacaaccaaagaagtcaacaagggatgttccacgcttaccccgtattggtaagtagcaggcaacgagaacttatatctaggatcacccgcaaattctgggggcacattcttctttactccgggaacaaaaagttgataaataagtttatccagaatctcaagtccggctatctgatactagacttacaccagaatatcttcgttaagaatctatccaagtcagagaaacagattattatgacggggggtttgaaacgtgagtgggtttttaaggtaacagtcaaggagaccaaagaatggtataagttagtcggatacagtgccctgattaaggactaattggttgaactccggaaccctaatcctgccctaggtggttaggcattatttgcaatatattaaagaaaactttgaaaatacgaagtttctattcccagctttgtctggt

SEQ ID NO: 68 - DNA, 20640 bp, synthetic construct
  source 1..20640: mol_type = other DNA
accaaacaaagttgggtaaggatagttcaatcaatgatcatcttctagtgcacttaggattcaagatcctattatcagggacaagagcaggattagggatatccgagatggccacacttttaaggagcttagcattgttcaaaagaaacaaggacaaaccacccattacatcaggatccggtggagccatcagaggaatcaaacacattattatagtaccaatccctggagattcctcaattaccactcgatccagacttctggaccggttggtgaggttaattggaaacccggatgtgagcgggcccaaactaacaggggcactaataggtatattatccttatttgtggagtctccaggtcaattgattcagaggatcaccgatgaccctgacgttagcataaggctgttagaggttgtccagagtgaccagtcacaatctggccttaccttcgcatcaagaggtaccaacatggaggatgaggcggaccaatacttttcacatgatgatccaattagtagtgatcaatccaggttcggatggttcgggaacaaggaaatctcagatattgaagtgcaagaccctgagggattcaacatgattctgggtaccatcctagcccaaatttgggtcttgctcgcaaaggcggttacggccccagacacggcagctgattcggagctaagaaggtggataaagtacacccaacaaagaagggtagttggtgaatttagattggagagaaaatggttggatgtggtgaggaacaggattgccgaggacctctccttacgccgattcatggtcgctctaatcctggatatcaagagaacacccggaaacaaacccaggattgctgaaatgatatgtgacattgatacatatatcgtagaggcaggattagccagttttatcctgactattaagtttgggatagaaactatgtatcctgctcttggactgcatgaatttgctggtgagttatccacacttgagtccttgatgaacctttaccagcaaatgggggaaactgcaccctacatggtaatcctggagaactcaattcagaacaagttcagtgcaggatcataccctctgctctggagctatgccatgggagtaggagtggaacttgaaaactccatgggaggtttgaactttggccgatcttactttgatccagcatattttagattagggcaagagatggtaaggaggtcagctggaaaggtcagttccacattggcatctgaactcggtatcactgccgaggatgcaaggcttgtttcagagattgcaatgcatactactgaggacaagatcagtagagcggttggacccagacaagcccaagtatcatttctacacggtgatcaaagtgagaatgagctaccgagattggggggcaaggaagataggagggtcaaacagagtcgaggagaagccagggagagctacagagaaaccgggcccagcagagcaagtgatgcgagagctgcccatcttccaaccggcacacccctagacattgacactgcaacggagtccagccaagatccgcaggacagtcgaaggtcagctgacgccctgcttaggctgcaagccatggcaggaatctcggaagaacaaggctcagacacggacacccctatagtgtacaatgacagaaatcttctagactaggtgcgagaggccgagggccagaacaacatccgcctaccatccatcattgttataaaaaacttaggaaccaggtccacacagccgccagcccatcaaccatccactcccacgattggagccaatggcagaagagcaggcacgccatgtcaaaaacggactggaatgcatccgggctctcaaggccgagcccatcggctcactggccatcgaggaagctatggcagcatggtcagaaatatcagacaacccaggacaggagcgagccacctgcagggaagagaaggcaggcagttcgggtctcagcaaaccatgcctctcagcaattggatcaactgaaggcggtgcacctcgcatccgcggtcagggacctggagagagcgatgacgacgctgaaactttgggaatccccccaagaaatctccaggcatcaagcactgggttacagtgttattacgtttatgatcacagcggtgaagcggttaagggaatccaagatgctgactctatcatggttcaatcaggccttgatggtgatagcaccctctcaggaggagacaatgaatctgaaaacagcgatgtggatattggcgaacctgataccgagggatatgctatcactgaccggggatctgctcccatctctatggggttcagggcttctgatgttgaaactgcagaaggaggggagatccacgagctcctgagactccaatccagaggcaacaactttccgaagcttgggaaaactctcaatgttcctccgcccccggaccccggtagggccagcacttccgggacacccattaaaaagggcacagacgcgagattagcctcatttggaacggagatcgcgtctttattgacaggtggtgcaacccaatgtgctcgaaagtcaccctcggaaccatcagggccaggtgcacctgcggggaatgtccccgagtgtgtgagcaatgccgcactgatacaggagtggacacccgaatctggtaccacaatctccccgagatcccagaataatgaagaagggggagactattatgatgatgagctgttctctgatgtccaagatattaaaacagccttggccaaaatacacgaggataatcagaagataatctccaagctagaatcactgctgttattgaagggagaagttgagtcaattaagaagcagatcaacaggcaaaatatcagcatatccaccctggaaggacacctctcaagcatcatgatcgccattcctggacttgggaaggatcccaacgaccccactgcagatgtcgaaatcaatcccgacttgaaacccatcataggcagagattcaggccgagcactggccgaagttctcaagaaacccgttgccagccgacaactccaaggaatgacaaatggacggaccagttccagaggacagctgctgaaggaatttcagctaaagccgatcgggaaaaagatgagctcagccgtcgggtttgttcctgacaccggccctgcatcacgcagtgtaatccgctccattataaaatccagccggctagaggaggatcggaagcgttacctgatgactctccttgatgatatcaaaggagccaatgatcttgccaagttccaccagatgctgatgaagataataatgaagtagctacagctcaacttacctgccaaccccatgccagtcgacccaactagtacaacctaaatccattataaaaaacttaggagcaaagtgattgcctcccaaggtccacaatgacagagacctacgacttcgacaagtcggcatgggacatcaaagggtcgatcgctccgatacaacccaccacctacagtgatggcaggctggtgccccaggtcagagtcatagatcctggtctaggcgacaggaaggatgaatgctttatgtacatgtttctgctgggggttgttgaggacagcgattccctagggcctccaatcgggcgagcatttgggttcctgcccttaggtgttggcagatccacagcaaagcccgaaaaactcctcaaagaggccactgagcttgacatagttgttagacgtacagcagggctcaatgaaaaactggtgttctacaacaacaccccactaactctcctcacaccttggagaaaggtcctaacaacagggagtgtcttcaacgcaaaccaagtgtgcaatgcggttaatctgataccgctcgataccccgcagaggttccgtgttgtttatatgagcatcacccgtctttcggataacgggtattacaccgttcctagaagaatgctggaattcagatcggtcaatgcagtggccttcaacctgctggtgacccttaggattgacaaggcgataggccctgggaagatcatcgacaatacagagcaacttcctgaggcaacatttatggtccacatcgggaacttcaggagaaagaagagtgaagtctactctgccgattattgcaaaatgaaaatcgaaaagatgggcctggtttttgcacttggtgggatagggggcaccagtcttcacattagaagcacaggcaaaatgagcaagactctccatgcacaactcgggttcaagaagaccttatgttacccgctgatggatatcaatgaagaccttaatcgattactctggaggagcagatgcaagatagtaagaatccaggcagttttgcagccatcagttcctcaagaattccgcatttacgacgacgtgatcataaatgatgaccaaggactattcaaagttctgtagaccgtagtgcccagcaatgcccgaaaacgacccccctcacaatgacagccagaaggcccggacaaaaaagccccctccgaaagactccacggaccaagcgagaggccagccagcagccgacggcaagcgcgaacaccaggcggccccagcacagaacagccctgacacaaggccaccaccagccaccccaatctgcatcctcctcgtgggacccccgaggaccaacccccaaggctgcccccgatccaaaccaccaaccgcatccccaccacccccgggaaagaaacccccagcaattggaaggcccctccccctcttcctcaacacaagaactccacaaccgaaccgcacaagcgaccgaggtgacccaaccgcaggcatccgactccctagacagatcctctctccccggcaaactaaacaaaacttagggccaaggaacatacacacccaacagaacccagaccccggcccacggcgccgcgcccccaacccccgacaaccagagggagcccccaaccaatcccgccggctcccccggtgcccacaggcagggacaccaacccccgaacagacccagcacccaaccatcgacaatccaagacgggggggcccccccaaaaaaaggcccccaggggccgacagccagcaccgcgaggaagcccacccaccccacacacgaccacggcaaccaaaccagaacccagaccaccctgggccaccagctcccagactcggccatcaccccgcagaaaggaaaggccacaacccgcgcaccccagccccgatccggcggggagccacccaacccgaaccagcacccaagagcgatccccgaaggacccccgaaccgcaaaggacatcagtatcccacagcctctccaagtcccccggtctcctcctcttctcgaagggaccaaaagatcaatccaccacacccgacgacactcaactccccacccctaaaggagacaccgggaatcccagaatcaagactcatccaatgtccatcatgggtctcaaggtgaacgtctctgccatattcatggcagtactgttaactctccaaacacccaccggtcaaatccattggggcaatctctctaagataggggtggtaggaataggaagtgcaagctacaaagttatgactcgttccagccatcaatcattagtcataaaattaatgcccaatataactctcctcaataactgcacgagggtagagattgcagaatacaggagactactgagaacagttttggaaccaattagagatgcacttaatgcaatgacccagaatataagaccggttcagagtgtagcttcaagtaggagacacaagagatttgcgggagtagtcctggcaggtgcggccctaggcgttgccacagctgctcagataacagccggcattgcacttcaccagtccatgctgaactctcaagccatcgacaatctgagagcgagcctggaaactactaatcaggcaattgagacaatcagacaagcagggcaggagatgatattggctgttcagggtgtccaagactacatcaataatgagctgataccgtctatgaaccaactatcttgtgatttaatcggccagaagctcgggctcaaattgctcagatactatacagaaatcctgtcattatttggccccagtttacgggaccccatatctgcggagatatctatccaggctttgagctatgcgcttggaggagacatcaataaggtgttagaaaagctcggatacagtggaggtgatttactgggcatcttagagagcggaggaataaaggcccggataactcacgtcgacacagagtcctacttcattgtcctcagtatagcctatccgacgctgtccgagattaagggggtgattgtccaccggctagagggggtctcgtacaacataggctctcaagagtggtataccactgtgcccaagtatgttgcaacccaagggtaccttatctcgaattttgatgagtcatcgtgtactttcatgccagaggggactgtgtgcagccaaaatgccttgtacccgatgagtcctctgctccaagaatgcctccgggggtacaccaagtcctgtgctcgtacactcgtatccgggtcttttgggaaccggttcattttatcacaagggaacctaatagccaattgtgcatcaatcctttgcaagtgttacacaacaggaacgatcattaatcaagaccctgacaagatcctaacatacattgctgccgatcactgcccggtagtcgaggtgaacggcgtgaccatccaagtcgggagcaggaggtatccagacgctgtgtacttgcacagaattgacctcggtcctcccatatcattggagaggttggacgtagggacaaatctggggaatgcaattgctaagttggaggatgccaaggaattgttggagtcatcggaccagatattgaggagtatgaaaggtttatcgagcactagcatagtctacatcctgattgcagtgtgtcttggagggttgatagggatccccgctttaatatgttgctgcagggggcgttgtaacaaaaagggagaacaagttggtatgtcaagaccaggcctaaagcctgatcttacgggaacatcaaaatcctatgtaaggtcgctctgatcctctacaactcttgaaacacaaatgtcccacaagtctcctcttcgtcatcaagcaaccaccgcacccagcatcaagcccacctgaaattatctccggcttccctctggccgaacaatatcggtagttaatcaaaacttagggtgcaagatcatccacaatgtcaccacaacgagaccggataaatgccttctacaaagataacccccatcccaagggaagtaggatagtcattaacagagaacatcttatgattgatagaccttatgttttgctggctgttctgtttgtcatgtttctgagcttgatcgggttgctagccattgcaggcattagacttcatcgggcagccatctacaccgcagagatccataaaagcctcagcaccaatctagatgtaactaactcaatcgagcatcaggtcaaggacgtgctgacaccactcttcaaaatcatcggtgatgaagtgggcctgaggacacctcagagattcactgacctagtgaaattaatctctgacaagattaaattccttaatccggatagggagtacgacttcagagatctcacttggtgtatcaacccgccagagagaatcaaattggattatgatcaatactgtgcagatgtggctgctgaagagctcatgaatgcattggtgaactcaactctactggagaccagaacaaccaatcagttcctagctgtctcaaagggaaactgctcagggcccactacaatcagaggtcaattctcaaacatgtcgctgtccctgttagacttgtatttaggtcgaggttacaatgtgtcatctatagtcactatgacatcccagggaatgtatgggggaacttacctagtggaaaagcctaatctgagcagcaaaaggtcagagttgtcacaactgagcatgtaccgagtgtttgaagtaggtgttatcagaaatccgggtttgggggctccggtgttccatatgacaaactatcttgagcaaccagtcagtaatgatctcagcaactgtatggtggctttgggggagctcaaactcgcagccctttgtcacggggaagattctatcacaattccctatcagggatcagggaaaggtgtcagcttccagctcgtcaagctaggtgtctggaaatccccaaccgacatgcaatcctgggtccccttatcaacggatgatccagtgatagacaggctttacctctcatctcacagaggtgttatcgctgacaatcaagcaaaatgggctgtcccgacaacacgaacagatgacaagttgcgaatggagacatgcttccaacaggcgtgtaagggtaaaatccaagcactctgcgagaatcccgagtgggcaccattgaaggataacaggattccttcatacggggtcttgtctgttgatctgagtctgacagttgagcttaaaatcaaaattgcttcgggattcgggccattgatcacacacggttcagggatggacctatacaaatccaaccacaacaatgtgtattggctgactatcccgccaatgaagaacctagccttaggtgtaatcaacacattggagtggataccgagattcaaggttagtccctacctcttcactgtcccaattaaggaagcaggcgaagactgccatgccccaacatacctacctgcggaggtggatggtgatgtcaaactcagttccaatctggtgattctacctggtcaagatctccaatatgttttggcaacctacgatacttccagggttgaacatgctgtggtttattacgtttacagcccaagccgctcattttcttacttttatccttttaggttgcctataaagggggtccccatcgaattacaagtggaatgcttcacatgggaccaaaaactctggtgccgtcacttctgtgtgcttgcggactcagaatctggtggacatatcactcactctgggatggtgggcatgggagtcagctgcacagtcacccgggaagatggaaccaatcgcagatagggctgctagtgaaccaatcacatgatgtcacccagacatcaggcatacccactagtctaccctccatcattgttataaaaaacttaggaaccaggtccacacagccgccagcccatcaacgcgtacggccaccatgagaggcggaggccttgtttgtgctttggtggttggtgcacttgtggccgcagtagcttcagctgctccagccgcacctagagcttctggtggagttgctgctactgttgcagctaacggcggacctgcctcacaaccaccccctgttccctcccctgcaactaccaaagcccggaagaggaagactaaaaagccacctaagagaccagaggccacaccaccacctgacgctaacgcaaccgttgcagctgggcacgcgaccttgagggctcacctgcgagagataaaagtcgaaaacgccgacgctcagttctacgtctgccctccacctaccggagcaactgtagttcaatttgaacagccacggaggtgcccgacaagaccagaaggacagaattacaccgaaggaatagccgtggtctttaaagagaatatcgccccttacaagttcaaggctacaatgtactacaaggacgtgaccgtctcacaggtgtggtttgggcacagatattcacagtttatgggaatcttcgaagatagagccccggtgcccttcgaagaggtgatcgataagataaacgctaagggcgtgtgcagatccaccgccaagtacgtgcgaaacaatatggaaactaccgctttccaccgagacgatcacgagaccgatatggagctgaagcctgccaaagtagccacgcgaacctcccgcggctggcacactaccgatctgaagtataaccctagccgcgttgaagcgttccacaggtacggtaccacagtaaactgtatcgtggaggaagttgacgctcgcagcgtgtacccctacgacgaattcgtgctggccaccggcgatttcgtatatatgtcacctttctacggatatcgcgagggcagccacacggaacacacctcttacgctgccgatcggttcaagcaagtcgacggtttttacgctagagacctgaccaccaaggcacgggcaacctcccctacaactaggaaccttcttactaccccaaaatttaccgtagcttgggactgggtgcctaagaggccagcagtctgcactatgactaagtggcaagaagtggacgaaatgctgagagctgagtacggcgggagttttaggttctcttccgacgctatttccaccacctttaccactaatctgactcaatatagtctgtctcgagtggacctgggcgattgtattggtcgagacgcacgcgaagctattgaccgaatgtttgcccgcaaatacaacgctacccacataaaggtaggccagcctcagtattacctggctactggaggctttctgattgcttaccagcccttgcttagtaatacccttgccgagctctacgttagagagtatatgcgcgagcaggatcgcaaacctcggaacgctacacctgcaccccttcgcgaagctccctctgcaaacgcctccgtagaacggatcaagaccacctcctctatcgagtttgcccggctccagtttacctacaatcacatccagcgacacgtgaacgatatgctcggaaggatcgcagtcgcgtggtgtgaactgcagaaccacgagctgactctgtggaacgaagcccggaaactgaatcctaacgctatcgcttctgccaccgtagggcgaagggtttctgctaggatgctcggtgacgtgatggccgtctccacttgtgttcctgtagctcccgacaacgtgatcgtgcagaattctatgcgagtaagcagtaggccaggtacctgctattcccgacctctggttagcttccggtacgaggaccaggggcctctgatcgaaggacagctcggagagaacaatgaattgagactgaccagagacgcactggagccgtgtactgtcggccacaggcgatattttatctttggaggggggtacgtctatttcgaggagtatgcctactcccaccaattgagcagggctgacgttacaacagtttccacgtttgctgacttgaatatcacgatgctcgaagacgcagaggcagtgcctctcgaggtttacacacgacacgagattaaagatagcgggctgctggactatactgaagtgcagagacgcaaccagctccacgacttgaggtttgctgatattgacaccgtgatcagggctgacgccaacgctgctatgttcgctggcttgtgtgctttcttcgagggaatgggtgacctgggcagagccgtgggtaaggtcgtaatgggcgtcgtgggcggagtagtaagtgccgtctccggagtatcaagctttatgtcaaaccccttcggcgctctggcggttggtcttctcgttttggcaggtcttgtagccgccttcttcgctttccgctatgtgctgcagctccaacggaatcctatgaaagctctgtaccccctgacaactaaggagctgaaaacttccgatcctggtggtgtaggcggtgaaggtgaagaaggagcagagggggggggctttgatgaagccaagctcgccgaagcacgcgaaatgattagatatatggccctggtgtctgctatggagagaacagaacacaaagctagaaagaaaggcacctctgccctgctctcttctaaggtcacaaatatggtgctcaggaagcggaataaggctagatattctccactgcacaacgaagacgaggccggagacgaagacgagttgtgattcgaactacagctcaacttacctgccaaccccatgccagtcgacccaactagtacaacctaaatccattataaaaaacttaggaaccaggtccacacagccgccagcccatcaaccatccactcccacgattggaggccggccatggagaacgctgtaggaaccgtgtgccatccttccctgatgaacatcgatgcagctgtgggtggagtgaaccacgctcccgttgaggccgcaaatccatacggcgcatatgtagctgcacctgctggccctggggcagatatgcagcaaaggttcctcaacgcatggcggcagcgcttggcccatggcagagttaggtgggttgcagaatgccaaatgactgcggaacagttcatgcagcctgacaacgcaaaccttgctcttgagcttcatcccgcgtttgacttttttgcaggagttgccgacgtcgaattgccaggtggcgaagtccctcctgctggacctggagctattcaggcaacttggagggtggttaacggcaatctgccactggcgctgtgtcctgttgcttttcgggacgccaggggactggaactgggagtaggccgacacgcgatggcacctgcaactatagccgcagtacgcggggcattcgaggatagaagctacccagccgtgttctatctgttgcaggccgctattcacggcagcgaacacgtattctgcgctctggcacggctggtcacccagtgtatcacctcctactggaacaatactcgctgtgctgctttcgtgaacgactatagcctggtctcctacatagtgacatacctgggcggagacctgccagaagagtgcatggccgtatatcgcgatttggtggctcacgtggaggcactcgcacaacttgtggacgactttacactgcctggacctgagcttggaggccaagctcaggccgagcttaatcatctgatgagagatcccgctctgctgcctccattggtctgggattgcgatggattgatgagacacgctgcacttgaccgccatcgggattgtcgcattgacgcgggcggacacgaaccagtgtatgctgctgcttgcaacgtagccacggccgacttcaaccggaacgacggacgactgctccacaacactcaagcgagggctgcagacgctgcggacgatagaccgcatagacccgccgattggaccgtgcaccacaagatctactactacgtgcttgtaccggccttttcaagaggcaggtgttgtaccgcgggtgtcaggtttgatcgggtatacgccactctgcagaacatggtggttccagaaattgcacccggcgaagaatgtccaagtgatcccgtgaccgatcctgcacacccactccaccctgctaatctggtagcaaacacagtgaacgctatgttccataacggacgggttgtagtggatgggccagcgatgttgaccctgcaggttctcgcccacaacatggcagagagaaccacggcacttctgtgttctgctgctccagacgctggagctaatacggcatctaccgcgaatatgcgaatatttgacggagctttgcatgctggcgtgctgttgatggctccacagcacttggatcatacaatccaaaacggggagtatttttacgtgcttccggttcacgccctctttgccggtgccgatcatgtggcaaatgcccccaattttccaccggccttgagagatcttgcaaggcacgtgcctcttgtgcctcccgctcttggcgctaattacttttcaagtattaggcaacctgtagtgcagcacgcacgagagtctgcagcaggcgaaaacgcccttacatacgccttgatggctggttattttaaaatgtctccagtggccctgtatcatcaacttaaaaccgggctgcactgataagcgcgcagcgcttagacgtctcgcgatcgatgctagtgtgaaatagacatcagaattaagaaaaacgtagggtccaagtggttccccgttatggactcgctatctgtcaaccagatcttataccctgaagttcacctagatagcccgatagttaccaataagatagtagccatcctggagtatgctcgagtccctcacgcttacagcctggaggaccctacactgtgtcagaacatcaagcaccgcctaaaaaacggattttccaaccaaatgattataaacaatgtggaagttgggaatgtcatcaagtccaagcttaggagttatccggcccactctcatattccatatccaaattgtaatcaggatttatttaacatagaagacaaagagtcaacgaggaagatccgtgaactcctcaaaaaggggaattcgctgtactccaaagtcagtgataaggttttccaatgcttaagggacactaactcacggcttggcctaggctccgaattgagggaggacatcaaggagaaagttattaacttgggagtttacatgcacagctcccagtggtttgagccctttctgttttggtttacagtcaagactgagatgaggtcagtgattaaatcacaaacccatacttgccataggaggagacacacacctgtattcttcactggtagttcagttgagttgctaatctctcgtgaccttgttgctataatcagtaaagagtctcaacatgtatattacctgacatttgaactggttttgatgtattgtgatgtcatagaggggaggttaatgacagagaccgctatgactattgatgctaggtatacagagcttctaggaagagtcagatacatgtggaaactgatagatggtttcttccctgcactcgggaatccaacttatcaaattgtagccatgctggagcctctttcacttgcttacctgcagctgagggatataacagtagaactcagaggtgctttccttaaccactgctttactgaaatacatgatgttcttgaccaaaacgggttttctgatgaaggtacttatcatgagttaactgaagctctagattacattttcataactgatgacatacatctgacaggggagattttctcatttttcagaagtttcggccaccccagacttgaagcagtaacggctgctgaaaatgttaggaaatacatgaatcagcctaaagtcattgtgtatgagactctgatgaaaggtcatgccatattttgtggaatcataatcaacggctatcgtgacaggcacggaggcagttggccaccgctgaccctccccctgcatgctgcagacacaatccggaatgctcaagcttcaggtgaagggttaacacatgagcagtgcgttgataactggaaatcttttgctggagtgaaatttggctgctttatgcctcttagcctggatagtgatctgacaatgtacctaaaggacaaggcacttgctgctctccaaagggaatgggattcagtttacccgaaagagttcctgcgttacgaccctcccaagggaaccgggtcacggaggcttgtagatgttttccttaatgattcgagctttgacccatatgatgtgataatgtatgttgtaagtggagcttacctccatgaccctgagttcaacctgtcttacagcctgaaagaaaaggagatcaaggaaacaggtagactttttgctaaaatgacttacaaaatgagggcatgccaagtgattgctgaaaatctaatctcaaacgggattggcaaatattttaaggacaatgggatggccaaggatgagcacgatttgactaaggcactccacactctagctgtctcaggagtccccaaagatctcaaagaaagtcacaggggggggccagtcttaaaaacctactcccgaagcccagtccacacaagtaccaggaacgtgagagcagcaaaagggtttatagggttccctcaagtaattcggcaggaccaagacactgatcatccggagaatatggaagcttacgagacagtcagtgcatttatcacgactgatctcaagaagtactgccttaattggagatatgagaccatcagcttgtttgcacagaggctaaatgagatttacggattgccctcatttttccagtggctgcataagaggcttgagacctctgtcctgtatgtaagtgaccctcattgcccccccgaccttgacgcccatatcccgttatataaagtccccaatgatcaaatcttcattaagtaccctatgggaggtatagaagggtattgtcagaagctgtggaccatcagcaccattccctatctatacctggctgcttatgagagcggagtaaggattgcttcgttagtgcaaggggacaatcagaccatagccgtaacaaaaagggtacccagcacatggccctacaaccttaagaaacgggaagctgctagagtaactagagattactttgtaattcttaggcaaaggctacatgatattggccatcacctcaaggcaaatgagacaattgtttcatcacatttttttgtctattcaaaaggaatatattatgatgggctacttgtgtcccaatcactcaagagcatcgcaagatgtgtattctggtcagagactatagttgatgaaacaagggcagcatgcagtaatattgctacaacaatggctaaaagcatcgagagaggttatgaccgttaccttgcatattccctgaacgtcctaaaagtgatacagcaaattctgatctctcttggcttcacaatcaattcaaccatgacccgggatgtagtcatacccctcctcacaaacaacgacctcttaataaggatggcactgttgcccgctcctattggggggatgaattatctgaatatgagcaggctgtttgtcagaaacatcggtgatccagtaacatcatcaattgctgatctcaagagaatgattctcgcctcactaatgcctgaagagaccctccatcaagtaatgacacaacaaccgggggactcttcattcctagactgggctagcgacccttactcagcaaatcttgtatgtgtccagagcatcactagactcctcaagaacataactgcaaggtttgtcctgatccatagtccaaacccaatgttaaaaggattattccatgatgacagtaaagaagaggacgagggactggcggcattcctcatggacaggcatattatagtacctagggcagctcatgaaatcctggatcatagtgtcacaggggcaagagagtctattgcaggcatgctggataccacaaaaggcttgattcgagccagcatgaggaagggggggttaacctctcgagtgataaccagattgtccaattatgactatgaacaattcagagcagggatggtgctattgacaggaagaaagagaaatgtcctcattgacaaagagtcatgttcagtgcagctggcgagagctctaagaagccatatgtgggcgaggctagctcgaggacggcctatttacggccttgaggtccctgatgtactagaatctatgcgaggccaccttattcggcgtcatgagacatgtgtcatctgcgagtgtggatcagtcaactacggatggttttttgtcccctcgggttgccaactggatgatattgacaaggaaacatcatccttgagagtcccatatattggttctaccactgatgagagaacagacatgaagcttgccttcgtaagagccccaagtcgatccttgcgatctgctgttagaatagcaacagtgtactcatgggcttacggtgatgatgatagctcttggaacgaagcctggttgttggctaggcaaagggccaatgtgagcctggaggagctaagggtgatcactcccatctcaacttcgactaatttagcgcataggttgagggatcgtagcactcaagtgaaatactcaggtacatcccttgtccgagtggcgaggtataccacaatctccaacgacaatctctcatttgtcatatcagataagaaggttgatactaactttatataccaacaaggaatgcttctagggttgggtgttttagaaacattgtttcgactcgagaaagataccggatcatctaacacggtattacatcttcacgtcgaaacagattgttgcgtgatcccgatgatagatcatcccaggatacccagctcccgcaagctagagctgagggcagagctatgtaccaacccattgatatatgataatgcacctttaattgacagagatgcaacaaggctatacacccagagccataggaggcaccttgtggaatttgttacatggtccacaccccaactatatcacattttagctaagtccacagcactatctatgattgacctggtaacaaaatttgagaaggaccatatgaatgaaatttcagctctcataggggatgacgatatcaatagtttcataactgagtttctgctcatagagccaagattattcactatctacttgggccagtgtgcggccatcaattgggcatttgatgtacattatcatagaccatcagggaaatatcagatgggtgagctgttgtcatcgttcctttctagaatgagcaaaggagtgtttaaggtgcttgtcaatgctctaagccacccaaagatctacaagaaattctggcattgtggtattatagagcctatccatggtccttcacttgatgctcaaaacttgcacacaactgtgtgcaacatggtttacacatgctatatgacctacctcgacctgttgttgaatgaagagttagaagagttcacatttctcttgtgtgaaagcgacgaggatgtagtaccggacagattcgacaacatccaggcaaaacacttatgtgttctggcagatttgtactgtcaaccagggacctgcccaccaattcgaggtctaagaccggtagagaaatgtgcagttctaaccgaccatatcaaggcagaggctatgttatctccagcaggatcttcgtggaacataaatccaattattgtagaccattactcatgctctctgacttatctccggcgaggatcgatcaaacagataagattgagagttgatccaggattcattttcgacgccctcgctgaggtaaatgtcagtcagccaaagatcggcagcaacaacatctcaaatatgagcatcaaggctttcagacccccacacgatgatgttgcaaaattgctcaaagatatcaacacaagcaagcacaatcttcccatttcagggggcaatctcgccaattatgaaatccatgctttccgcagaatcgggttgaactcatctgcttgctacaaagctgttgagatatcaacattaattaggagatgccttgagccaggggaggacggcttgttcttgggtgagggatcgggttctatgttgatcacttataaagagatacttaaactaaacaagtgcttctataatagtggggtttccgccaattctagatctggtcaaagggaattagcaccctatccctccgaagttggccttgtcgaacacagaatgggagtaggtaatattgtcaaagtgctctttaacgggaggcccgaagtcacgtgggtaggcagtgtagattgcttcaatttcatagttagtaatatccctacctctagtgtggggtttatccattcagatatagagaccttgcctgacaaagatactatagagaagctagaggaattggcagccatcttatcgatggctctgctcctgggcaaaataggatcaatactggtgattaagcttatgcctttcagcggggattttgttcagggatttataagttatgtagggtctcattatagagaagtgaaccttgtataccctagatacagcaacttcatctctactgaatcttatttggttatgacagatctcaaggctaaccggctaatgaatcctgaaaagattaagcagcagataattgaatcatctgtgaggacttcacctggacttataggtcacatcctatccattaagcaactaagctgcatacaagcaattgtgggagacgcagttagtagaggtgatatcaatcctactctgaaaaaacttacacctatagagcaggtgctgatcaattgcgggttggcaattaacggacctaagctgtgcaaagaattgatccaccatgatgttgcctcagggcaagatggattgcttaattctatactcatcctctacagggagttggcaagattcaaagacaaccaaagaagtcaacaagggatgttccacgcttaccccgtattggtaagtagcaggcaacgagaacttatatctaggatcacccgcaaattctgggggcacattcttctttactccgggaacaaaaagttgataaataagtttatccagaatctcaagtccggctatctgatactagacttacaccagaatatcttcgttaagaatctatccaagtcagagaaacagattattatgacggggggtttgaaacgtgagtgggtttttaaggtaacagtcaaggagaccaaagaatggtataagttagtcggatacagtgccctgattaaggactaattggttgaactccggaaccctaatcctgccctaggtggttaggcattatttgcaatatattaaagaaaactttgaaaatacgaagtttctattcccagctttgtctggt

SEQ ID NO: 69 - DNA, 20640 bp, synthetic construct; identical to SEQ ID NO: 68
  source 1..20640: mol_type = other DNA

SEQ ID NO: 70 - DNA, 20568 bp, synthetic construct
  source 1..20568: mol_type = other DNA
accaaacaaagttgggtaaggatagttcaatcaatgatcatcttctagtgcacttaggattcaagatcctattatcagggacaagagcaggattagggatatccgagatggccacacttttaaggagcttagcattgttcaaaagaaacaaggacaaaccacccattacatcaggatccggtggagccatcagaggaatcaaacacattattatagtaccaatccctggagattcctcaattaccactcgatccagacttctggaccggttggtgaggttaattggaaacccggatgtgagcgggcccaaactaacaggggcactaataggtatattatccttatttgtggagtctccaggtcaattgattcagaggatcaccgatgaccctgacgttagcataaggctgttagaggttgtccagagtgaccagtcacaatctggccttaccttcgcatcaagaggtaccaacatggaggatgaggcggaccaatacttttcacatgatgatccaattagtagtgatcaatccaggttcggatggttcgggaacaaggaaatctcagatattgaagtgcaagaccctgagggattcaacatgattctgggtaccatcctagcccaaatttgggtcttgctcgcaaaggcggttacggccccagacacggcagctgattcggagctaagaaggtggataaagtacacccaacaaagaagggtagttggtgaatttagattggagagaaaatggttggatgtggtgaggaacaggattgccgaggacctctccttacgccgattcatggtcgctctaatcctggatatcaagagaacacccggaaacaaacccaggattgctgaaatgatatgtgacattgatacatatatcgtagaggcaggattagccagttttatcctgactattaagtttgggatagaaactatgtatcctgctcttggactgcatgaatttgctggtgagttatccacacttgagtccttgatgaacctttaccagcaaatgggggaaactgcaccctacatggtaatcctggagaactcaattcagaacaagttcagtgcaggatcataccctctgctctggagctatgccatgggagtaggagtggaacttgaaaactccatgggaggtttgaactttggccgatcttactttgatccagcatattttagattagggcaagagatggtaaggaggtcagctggaaaggtcagttccacattggcatctgaactcggtatcactgccgaggatgcaaggcttgtttcagagattgcaatgcatactactgaggacaagatcagtagagcggttggacccagacaagcccaagtatcatttctacacggtgatcaaagtgagaatgagctaccgagattggggggcaaggaagataggagggtcaaacagagtcgaggagaagccagggagagctacagagaaaccgggcccagcagagcaagtgatgcgagagctgcccatcttccaaccggcacacccctagacattgacactgcaacggagtccagccaagatccgcaggacagtcgaaggtcagctgacgccctgcttaggctgcaagccatggcaggaatctcggaagaacaaggctcagacacggacacccctatagtgtacaatgacagaaatcttctagactaggtgcgagaggccgagggccagaacaacatccgcctaccatccatcattgttataaaaaacttaggaaccaggtccacacagccgccagcccatcaaccatccactcccacgattggagccaatggcagaagagcaggcacgccatgtcaaaaacggactggaatgcatccgggctctcaaggccgagcccatcggctcactggccatcgaggaagctatggcagcatggtcagaaatatcagacaacccaggacaggagcgagccacctgcagggaagagaaggcaggcagttcgggtctcagcaaaccatgcctctcagcaattggatcaactgaaggcggtgcacctcgcatccgcggtcagggacctggagagagcgatgacgacgctgaaactttgggaatccccccaagaaatctccaggcatcaagcactgggttacagtgttattacgtttatgatcacagcggtgaagcggttaagggaatccaagatgctgactctatcatggttcaatcaggccttgatggtgatagcaccctctcaggaggagacaatgaatctgaaaacagcgatgtggatattggcgaacctgataccgagggatatgctatcactgaccggggatctgctcccatctctatggggttcagggcttctgatgttgaaactgcagaaggaggggagatccacgagctcctgagactccaatccagaggcaacaactttccgaagcttgggaaaactctcaatgttcctccgcccccggaccccggtagggccagcacttccgggacacccattaaaaagggcacagacgcgagattagcctcatttggaacggagatcgcgtctttattgacaggtggtgcaacccaatgtgctcgaaagtcaccctcggaaccatcagggccaggtgcacctgcggggaatgtccccgagtgtgtgagcaatgccgcactgatacaggagtggacacccgaatctggtaccacaatctccccgagatcccagaataatgaagaagggggagactattatgatgatgagctgttctctgatgtccaagatattaaaacagccttggccaaaatacacgaggataatcagaagataatctccaagctagaatcactgctgttattgaagggagaagttgagtcaattaagaagcagatcaacaggcaaaatatcagcatatccaccctggaaggacacctctcaagcatcatgatcgccattcctggacttgggaaggatcccaacgaccccactgcagatgtcgaaatcaatcccgacttgaaacccatcataggcagagattcaggccgagcactggccgaagttctcaagaaacccgttgccagccgacaactccaaggaatgacaaatggacggaccagttccagaggacagctgctgaaggaatttcagctaaagccgatcgggaaaaagatgagctcagccgtcgggtttgttcctgacaccggccctgcatcacgcagtgtaatccgctccattataaaatccagccggctagaggaggatcggaagcgttacctgatgactctccttgatgatatcaaaggagccaatgatcttgccaagttccaccagatgctgatgaagataataatgaagtagctacagctcaacttacctgccaaccccatgccagtcgacccaactagtacaacctaaatccattataaaaaacttaggagcaaagtgattgcctcccaaggtccacaatgacagagacctacgacttcgacaagtcggcatgggacatcaaagggtcgatcgctccgatacaacccaccacctacagtgatggcaggctggtgccccaggtcagagtcatagatcctggtctaggcgacaggaaggatgaatgctttatgtacatgtttctgctgggggttgttgaggacagcgattccctagggcctccaatcgggcgagcatttgggttcctgcccttaggtgttggcagatccacagcaaagcccgaaaaactcctcaaagaggccactgagcttgacatagttgttagacgtacagcagggctcaatgaaaaactggtgttctacaacaacaccccactaactctcctcacaccttggagaaaggtcctaacaacagggagtgtcttcaacgcaaaccaagtgtgcaatgcggttaatctgataccgctcgataccccgcagaggttccgtgttgtttatatgagcatcacccgtctttcggataacgggtattacaccgttcctagaagaatgctggaattcagatcggtcaatgcagtggccttcaacctgctggtgacccttaggattgacaaggcgataggccctgggaagatcatcgacaatacagagcaacttcctgaggcaacatttatggtccacatcgggaacttcaggagaaagaagagtgaagtctactctgccgattattgcaaaatgaaaatcgaaaagatgggcctggtttttgcacttggtgggatagggggcaccagtcttcacattagaagcacaggcaaaatgagcaagactctccatgcacaactcgggttcaagaagaccttatgttacccgctgatggatatcaatgaagaccttaatcgattactctggaggagcagatgcaagatagtaagaatccaggcagttttgcagccatcagttcctcaagaattccgcatttacgacgacgtgatcataaatgatgaccaaggactattcaaagttctgtagaccgtagtgcccagcaatgcccgaaaacgacccccctcacaatgacagccagaaggcccggacaaaaaagccccctccgaaagactccacggaccaagcgagaggccagccagcagccgacggcaagcgcgaacaccaggcggccccagcacagaacagccctgacacaaggccaccaccagccaccccaatctgcatcctcctcgtgggacccccgaggaccaacccccaaggctgcccccgatccaaaccaccaaccgcatccccaccacccccgggaaagaaacccccagcaattggaaggcccctccccctcttcctcaacacaagaactccacaaccgaaccgcacaagcgaccgaggtgacccaaccgcaggcatccgactccctagacagatcctctctccccggcaaactaaacaaaacttagggccaaggaacatacacacccaacagaacccagaccccggcccacggcgccgcgcccccaacccccgacaaccagagggagcccccaaccaatcccgccggctcccccggtgcccacaggcagggacaccaacccccgaacagacccagcacccaaccatcgacaatccaagacgggggggcccccccaaaaaaaggcccccaggggccgacagccagcaccgcgaggaagcccacccaccccacacacgaccacggcaaccaaaccagaacccagaccaccctgggccaccagctcccagactcggccatcaccccgcagaaaggaaaggccacaacccgcgcaccccagccccgatccggcggggagccacccaacccgaaccagcacccaagagcgatccccgaaggacccccgaaccgcaaaggacatcagtatcccacagcctctccaagtcccccggtctcctcctcttctcgaagggaccaaaagatcaatccaccacacccgacgacactcaactccccacccctaaaggagacaccgggaatcccagaatcaagactcatccaatgtccatcatgggtctcaaggtgaacgtctctgccatattcatggcagtactgttaactctccaaacacccaccggtcaaatccattggggcaatctctctaagataggggtggtaggaataggaagtgcaagctacaaagttatgactcgttccagccatcaatcattagtcataaaattaatgcccaatataactctcctcaataactgcacgagggtagagattgcagaatacaggagactactgagaacagttttggaaccaattagagatgcacttaatgcaatgacccagaatataagaccggttcagagtgtagcttcaagtaggagacacaagagatttgcgggagtagtcctggcaggtgcggccctaggcgttgccacagctgctcagataacagccggcattgcacttcaccagtccatgctgaactctcaagccatcgacaatctgagagcgagcctggaaactactaatcaggcaattgagacaatcagacaagcagggcaggagatgatattggctgttcagggtgtccaagactacatcaataatgagctgataccgtctatgaaccaactatcttgtgatttaatcggccagaagctcgggctcaaattgctcagatactatacagaaatcctgtcattatttggccccagtttacgggaccccatatctgcggagatatctatccaggctttgagctatgcgcttggaggagacatcaataaggtgttagaaaagctcggatacagtggaggtgatttactgggcatcttagagagcggaggaataaaggcccggataactcacgtcgacacagagtcctacttcattgtcctcagtatagcctatccgacgctgtccgagattaagggggtgattgtccaccggctagagggggtctcgtacaacataggctctcaagagtggtataccactgtgcccaagtatgttgcaacccaagggtaccttatctcgaattttgatgagtcatcgtgtactttcatgccagaggggactgtgtgcagccaaaatgccttgtacccgatgagtcctctgctccaagaatgcctccgggggtacaccaagtcctgtgctcgtacactcgtatccgggtcttttgggaaccggttcattttatcacaagggaacctaatagccaattgtgcatcaatcctttgcaagtgttacacaacaggaacgatcattaatcaagaccctgacaagatcctaacatacattgctgccgatcactgcccggtagtcgaggtgaacggcgtgaccatccaagtcgggagcaggaggtatccagacgctgtgtacttgcacagaattgacctcggtcctcccatatcattggagaggttggacgtagggacaaatctggggaatgcaattgctaagttggaggatgccaaggaattgttggagtcatcggaccagatattgaggagtatgaaaggtttatcgagcactagcatagtctacatcctgattgcagtgtgtcttggagggttgatagggatccccgctttaatatgttgctgcagggggcgttgtaacaaaaagggagaacaagttggtatgtcaagaccaggcctaaagcctgatcttacgggaacatcaaaatcctatgtaaggtcgctctgatcctctacaactcttgaaacacaaatgtcccacaagtctcctcttcgtcatcaagcaaccaccgcacccagcatcaagcccacctgaaattatctccggcttccctctggccgaacaatatcggtagttaatcaaaacttagggtgcaagatcatccacaatgtcaccacaacgagaccggataaatgccttctacaaagataacccccatcccaagggaagtaggatagtcattaacagagaacatcttatgattgatagaccttatgttttgctggctgttctgtttgtcatgtttctgagcttgatcgggttgctagccattgcaggcattagacttcatcgggcagccatctacaccgcagagatccataaaagcctcagcaccaatctagatgtaactaactcaatcgagcatcaggtcaaggacgtgctgacaccactcttcaaaatcatcggtgatgaagtgggcctgaggacacctcagagattcactgacctagtgaaattaatctctgacaagattaaattccttaatccggatagggagtacgacttcagagatctcacttggtgtatcaacccgccagagagaatcaaattggattatgatcaatactgtgcagatgtggctgctgaagagctcatgaatgcattggtgaactcaactctactggagaccagaacaaccaatcagttcctagctgtctcaaagggaaactgctcagggcccactacaatcagaggtcaattctcaaacatgtcgctgtccctgttagacttgtatttaggtcgaggttacaatgtgtcatctatagtcactatgacatcccagggaatgtatgggggaacttacctagtggaaaagcctaatctgagcagcaaaaggtcagagttgtcacaactgagcatgtaccgagtgtttgaagtaggtgttatcagaaatccgggtttgggggctccggtgttccatatgacaaactatcttgagcaaccagtcagtaatgatctcagcaactgtatggtggctttgggggagctcaaactcgcagccctttgtcacggggaagattctatcacaattccctatcagggatcagggaaaggtgtcagcttccagctcgtcaagctaggtgtctggaaatccccaaccgacatgcaatcctgggtccccttatcaacggatgatccagtgatagacaggctttacctctcatctcacagaggtgttatcgctgacaatcaagcaaaatgggctgtcccgacaacacgaacagatgacaagttgcgaatggagacatgcttccaacaggcgtgtaagggtaaaatccaagcactctgcgagaatcccgagtgggcaccattgaaggataacaggattccttcatacggggtcttgtctgttgatctgagtctgacagttgagcttaaaatcaaaattgcttcgggattcgggccattgatcacacacggttcagggatggacctatacaaatccaaccacaacaatgtgtattggctgactatcccgccaatgaagaacctagccttaggtgtaatcaacacattggagtggataccgagattcaaggttagtccctacctcttcactgtcccaattaaggaagcaggcgaagactgccatgccccaacatacctacctgcggaggtggatggtgatgtcaaactcagttccaatctggtgattctacctggtcaagatctccaatatgttttggcaacctacgatacttccagggttgaacatgctgtggtttattacgtttacagcccaagccgctcattttcttacttttatccttttaggttgcctataaagggggtccccatcgaattacaagtggaatgcttcacatgggaccaaaaactctggtgccgtcacttctgtgtgcttgcggactcagaatctggtggacatatcactcactctgggatggtgggcatgggagtcagctgcacagtcacccgggaagatggaaccaatcgcagatagggctgctagtgaaccaatcacatgatgtcacccagacatcaggcatacccactagtctaccctccatcattgttataaaaaacttaggaaccaggtccacacagccgccagcccatcaacgcgtacggccaccatgaggggaggaggccttgtctgtgcacttgttgtaggagctttggtcgccgccgtagctagtgcagctccagcagcaccaagggcttcaggaggggttgcagctactgttgctgctaacggaggacctgctagccaaccacctccggtgccttctccggctactaccaaagcccgcaagcgaaaaacaaagaagcccccaaagaggccagaggccacacctccacccgacgctaacgctactgtggcggctggacacgctactttgagagcccacctgcgggaaatcaaggttgagaacgcagacgcacaattctacgtttgtcccccccctacaggtgcaacagtcgtgcagtttgagcagccaagacgctgtcctactaggcctgagggacaaaattacaccgagggtatcgccgtagtttttaaggagaatatcgcaccctataagtttaaagcgacaatgtactataaggatgtgaccgtcagccaagtctggtttggtcaccgatacagtcagtttatgggaatctttgaggaccgggccccggtccctttcgaagaagtgatcgacaagattaacgccaagggagtgtgcaggtcaaccgcaaagtacgtccgaaacaatatggaaacaaccgccttccacagggacgaccacgaaacagatatggagcttaagccggctaaagtggccactcgcacgtcaagaggttggcataccacggacctgaaatataacccttctagagttgaagctttccaccggtatgggaccacggtgaactgtattgtggaagaagtggacgccagatccgtgtacccctacgacgaattcgttcttgctacaggcgatttcgtgtatatgtctcctttctacggctacagggagggctcccacaccgagcacacctcctacgccgcagatagatttaaacaggtggacggcttctacgctcgcgatctgactactaaggcacgggcaacaagcccaacaactcgcaatttgctgaccacaccaaagtttactgtggcctgggactgggtacccaagaggcctgctgtttgcacaatgaccaaatggcaggaggttgacgagatgctccgggccgaatatggaggatcctttagattctcttctgacgctatcagtaccaccttcaccacaaatctgactcagtactctctgtctcgcgtagatctgggagactgtatcggtagggacgcacgcgaggctatagatcggatgttcgcccggaaatacaacgccacccacattaaagtggggcagccccagtattacttggctactgggggcttccttatcgcttatcagcctctgctctcaaataccctggcggagctttatgtacgcgagtatatgagggagcaggacaggaagccacgcaacgctaccccagcacccctgagagaagcgccttctgccaacgcgagtgtggaacgaattaagaccacgtcttcaatcgaattcgctcggctccaatttacctacaaccacattcaacgccacgttaacgatatgctgggaaggattgcagttgcttggtgtgagctccagaaccacgaactgacactgtggaacgaggccagaaagcttaacccaaacgctattgcttccgcgacagttggaagaagagtgtctgcacgaatgctcggcgacgttatggctgttagtacctgtgtgcctgtggcccctgacaatgtaattgttcagaacagtatgagagtctcttctagacccggcacttgctactccaggccactggtctcttttcgctacgaggatcaggggcctttgatcgagggccagttgggagagaataacgaactgcgcctgaccagagacgctctggaaccctgtacagtcggccacagacgatattttatattcggcggcggttacgtatattttgaagagtatgcgtactcccaccaactgtccagagcagatgtgaccactgtgagcacttttatcgatctcaatatcactatgctggaggatcacgagtttgttccgttggaagtgtacactcggcacgagatcaaggacagtggcctgctcgattataccgaagtccagaggcgcaatcaactgcacgatctgagatttgccgatattgacacagtgattagggctgacgctaacgccgctatgtttgctggcctgtgtgcctttttcgagggaatgggtgatctcggaagagccgtaggcaaggtggttatgggagtcgtaggtggcgtcgttagtgccgtgtcaggggtgtctagctttatgtctaaccccttcggagctttggctgtgggtctcctggtacttgccggactggtggccgcattttttgcctttaggtacgtcctgcagctgcagaggaatccaatgaaggccctgtatccacttacaacaaaggaacttaaaacctccgatcctggaggagttggaggagaaggcgaagagggagcggaaggtggtgggtttgacgaggccaagttggctgaggcccgagagatgataaggtatatggctctcgtatctgcaatggagagaactgagcacaaagctcgcaagaagggaaccagtgccctgctgagcagcaaagtgacaaatatgtaatgattcgaactacagctcaacttacctgccaaccccatgccagtcgacccaactagtacaacctaaatccattataaaaaacttaggaaccaggtccacacagccgccagcccatcaaccatccactcccacgattggaggccggccatggagaacgctgtaggaaccgtgtgccatccttccctgatgaacatcgatgcagctgtgggtggagtgaaccacgctcccgttgaggccgcaaatccatacggcgcatatgtagctgcacctgctggccctggggcagatatgcagcaaaggttcctcaacgcatggcggcagcgcttggcccatggcagagttaggtgggttgcagaatgccaaatgactgcggaacagttcatgcagcctgacaacgcaaaccttgctcttgagcttcatcccgcgtttgacttttttgcaggagttgccgacgtcgaattgccaggtggcgaagtccctcctgctggacctggagctattcaggcaacttggagggtggttaacggcaatctgccactggcgctgtgtcctgttgcttttcgggacgccaggggactggaactgggagtaggccgacacgcgatggcacctgcaactatagccgcagtacgcggggcattcgaggatagaagctacccagccgtgttctatctgttgcaggccgctattcacggcagcgaacacgtattctgcgctctggcacggctggtcacccagtgtatcacctcctactggaacaatactcgctgtgctgctttcgtgaacgactatagcctggtctcctacatagtgacatacctgggcggagacctgccagaagagtgcatggccgtatatcgcgatttggtggctcacgtggaggcactcgcacaacttgtggacgactttacactgcctggacctgagcttggaggccaagctcaggccgagcttaatcatctgatgagagatcccgctctgctgcctccattggtctgggattgcgatggattgatgagacacgctgcacttgaccgccatcgggattgtcgcattgacgcgggcggacacgaaccagtgtatgctgctgcttgcaacgtagccacggccgacttcaaccggaacgacggacgactgctccacaacactcaagcgagggctgcagacgctgcggacgatagaccgcatagacccgccgattggaccgtgcaccacaagatctactactacgtgcttgtaccggccttttcaagaggcaggtgttgtaccgcgggtgtcaggtttgatcgggtatacgccactctgcagaacatggtggttccagaaattgcacccggcgaagaatgtccaagtgatcccgtgaccgatcctgcacacccactccaccctgctaatctggtagcaaacacagtgaacgctatgttccataacggacgggttgtagtggatgggccagcgatgttgaccctgcaggttctcgcccacaacatggcagagagaaccacggcacttctgtgttctgctgctccagacgctggagctaatacggcatctaccgcgaatatgcgaatatttgacggagctttgcatgctggcgtgctgttgatggctccacagcacttggatcatacaatccaaaacggggagtatttttacgtgcttccggttcacgccctctttgccggtgccgatcatgtggcaaatgcccccaattttccaccggccttgagagatcttgcaaggcacgtgcctcttgtgcctcccgctcttggcgctaattacttttcaagtattaggcaacctgtagtgcagcacgcacgagagtctgcagcaggcgaaaacgcccttacatacgccttgatggctggttattttaaaatgtctccagtggccctgtatcatcaacttaaaaccgggctgcactgataagcgcgcagcgcttagacgtctcgcgatcgatgctagtgtgaaatagacatcagaattaagaaaaacgtagggtccaagtggttccccgttatggactcgctatctgtcaaccagatcttataccctgaagttcacctagatagcccgatagttaccaataagatagtagccatcctggagtatgctcgagtccctcacgcttacagcctggaggaccctacactgtgtcagaacatcaagcaccgcctaaaaaacggattttccaaccaaatgattataaacaatgtggaagttgggaatgtcatcaagtccaagcttaggagttatccggcccactctcatattccatatccaaattgtaatcaggatttatttaacatagaagacaaagagtcaacgaggaagatccgtgaactcctcaaaaaggggaattcgctgtactccaaagtcagtgataaggttttccaatgcttaagggacactaactcacggcttggcctaggctccgaattgagggaggacatcaaggagaaagttattaacttgggagtttacatgcacagctcccagtggtttgagccctttctgttttggtttacagtcaagactgagatgaggtcagtgattaaatcacaaacccatacttgccataggaggagacacacacctgtattcttcactggtagttcagttgagttgctaatctctcgtgaccttgttgctataatcagtaaagagtctcaacatgtatattacctgacatttgaactggttttgatgtattgtgatgtcatagaggggaggttaatgacagagaccgctatgactattgatgctaggtatacagagcttctaggaagagtcagatacatgtggaaactgatagatggtttcttccctgcactcgggaatccaacttatcaaattgtagccatgctggagcctctttcacttgcttacctgcagctgagggatataacagtagaactcagaggtgctttccttaaccactgctttactgaaatacatgatgttcttgaccaaaacgggttttctgatgaaggtacttatcatgagttaactgaagctctagattacattttcataactgatgacatacatctgacaggggagattttctcatttttcagaagtttcggccaccccagacttgaagcagtaacggctgctgaaaatgttaggaaatacatgaatcagcctaaagtcattgtgtatgagactctgatgaaaggtcatgccatattttgtggaatcataatcaacggctatcgtgacaggcacggaggcagttggccaccgctgaccctccccctgcatgctgcagacacaatccggaatgctcaagcttcaggtgaagggttaacacatgagcagtgcgttgataactggaaatcttttgctggagtgaaatttggctgctttatgcctcttagcctggatagtgatctgacaatgtacctaaaggacaaggcacttgctgctctccaaagggaatgggattcagtttacccgaaagagttcctgcgttacgaccctcccaagggaaccgggtcacggaggcttgtagatgttttccttaatgattcgagctttgacccatatgatgtgataatgtatgttgtaagtggagcttacctccatgaccctgagttcaacctgtcttacagcctgaaagaaaaggagatcaaggaaacaggtagactttttgctaaaatgacttacaaaatgagggcatgccaagtgattgctgaaaatctaatctcaaacgggattggcaaatattttaaggacaatgggatggccaaggatgagcacgatttgactaaggcactccacactctagctgtctcaggagtccccaaagatctcaaagaaagtcacaggggggggccagtcttaaaaacctactcccgaagcccagtccacacaagtaccaggaacgtgagagcagcaaaagggtttatagggttccctcaagtaattcggcaggaccaagacactgatcatccggagaatatggaagcttacgagacagtcagtgcatttatcacgactgatctcaagaagtactgccttaattggagatatgagaccatcagcttgtttgcacagaggctaaatgagatttacggattgccctcatttttccagtggctgcataagaggcttgagacctctgtcctgtatgtaagtgaccctcattgcccccccgaccttgacgcccatatcccgttatataaagtccccaatgatcaaatcttcattaagtaccctatgggaggtatagaagggtattgtcagaagctgtggaccatcagcaccattccctatctatacctggctgcttatgagagcggagtaaggattgcttcgttagtgcaaggggacaatcagaccatagccgtaacaaaaagggtacccagcacatggccctacaaccttaagaaacgggaagctgctagagtaactagagattactttgtaattcttaggcaaaggctacatgatattggccatcacctcaaggcaaatgagacaattgtttcatcacatttttttgtctattcaaaaggaatatattatgatgggctacttgtgtcccaatcactcaagagcatcgcaagatgtgtattctggtcagagactatagttgatgaaacaagggcagcatgcagtaatattgctacaacaatggctaaaagcatcgagagaggttatgaccgttaccttgcatattccctgaacgtcctaaaagtgatacagcaaattctgatctctcttggcttcacaatcaattcaaccatgacccgggatgtagtcatacccctcctcacaaacaacgacctcttaataaggatggcactgttgcccgctcctattggggggatgaattatctgaatatgagcaggctgtttgtcagaaacatcggtgatccagtaacatcatcaattgctgatctcaagagaatgattctcgcctcactaatgcctgaagagaccctccatcaagtaatgacacaacaaccgggggactcttcattcctagactgggctagcgacccttactcagcaaatcttgtatgtgtccagagcatcactagactcctcaagaacataactgcaaggtttgtcctgatccatagtccaaacccaatgttaaaaggattattccatgatgacagtaaagaagaggacgagggactggcggcattcctcatggacaggcatattatagtacctagggcagctcatgaaatcctggatcatagtgtcacaggggcaagagagtctattgcaggcatgctggataccacaaaaggcttgattcgagccagcatgaggaagggggggttaacctctcgagtgataaccagattgtccaattatgactatgaacaattcagagcagggatggtgctattgacaggaagaaagagaaatgtcctcattgacaaagagtcatgttcagtgcagctggcgagagctctaagaagccatatgtgggcgaggctagctcgaggacggcctatttacggccttgaggtccctgatgtactagaatctatgcgaggccaccttattcggcgtcatgagacatgtgtcatctgcgagtgtggatcagtcaactacggatggttttttgtcccctcgggttgccaactggatgatattgacaaggaaacatcatccttgagagtcccatatattggttctaccactgatgagagaacagacatgaagcttgccttcgtaagagccccaagtcgatccttgcgatctgctgttagaatagcaacagtgtactcatgggcttacggtgatgatgatagctcttggaacgaagcctggttgttggctaggcaaagggccaatgtgagcctggaggagctaagggtgatcactcccatctcaacttcgactaatttagcgcataggttgagggatcgtagcactcaagtgaaatactcaggtacatcccttgtccgagtggcgaggtataccacaatctccaacgacaatctctcatttgtcatatcagataagaaggttgatactaactttatataccaacaaggaatgcttctagggttgggtgttttagaaacattgtttcgactcgagaaagataccggatcatctaacacggtattacatcttcacgtcgaaacagattgttgcgtgatcccgatgatagatcatcccaggatacccagctcccgcaagctagagctgagggcagagctatgtaccaacccattgatatatgataatgcacctttaattgacagagatgcaacaaggctatacacccagagccataggaggcaccttgtggaatttgttacatggtccacaccccaactatatcacattttagctaagtccacagcactatctatgattgacctggtaacaaaatttgagaaggaccatatgaatgaaatttcagctctcataggggatgacgatatcaatagtttcataactgagtttctgctcatagagccaagattattcactatctacttgggccagtgtgcggccatcaattgggcatttgatgtacattatcatagaccatcagggaaatatcagatgggtgagctgttgtcatcgttcctttctagaatgagcaaaggagtgtttaaggtgcttgtcaatgctctaagccacccaaagatctacaagaaattctggcattgtggtattatagagcctatccatggtccttcacttgatgctcaaaacttgcacacaactgtgtgcaacatggtttacacatgctatatgacctacctcgacctgttgttgaatgaagagttagaagagttcacatttctcttgtgtgaaagcgacgaggatgtagtaccggacagattcgacaacatccaggcaaaacacttatgtgttctggcagatttgtactgtcaaccagggacctgcccaccaattcgaggtctaagaccggtagagaaatgtgcagttctaaccgaccatatcaaggcagaggctatgttatctccagcaggatcttcgtggaacataaatccaattattgtagaccattactcatgctctctgacttatctccggcgaggatcgatcaaacagataagattgagagttgatccaggattcattttcgacgccctcgctgaggtaaatgtcagtcagccaaagatcggcagcaacaacatctcaaatatgagcatcaaggctttcagacccccacacgatgatgttgcaaaattgctcaaagatatcaacacaagcaagcacaatcttcccatttcagggggcaatctcgccaattatgaaatccatgctttccgcagaatcgggttgaactcatctgcttgctacaaagctgttgagatatcaacattaattaggagatgccttgagccaggggaggacggcttgttcttgggtgagggatcgggttctatgttgatcacttataaagagatacttaaactaaacaagtgcttctataatagtggggtttccgccaattctagatctggtcaaagggaattagcaccctatccctccgaagttggccttgtcgaacacagaatgggagtaggtaatattgtcaaagtgctctttaacgggaggcccgaagtcacgtgggtaggcagtgtagattgcttcaatttcatagttagtaatatccctacctctagtgtggggtttatccattcagatatagagaccttgcctgacaaagatactatagagaagctagaggaattggcagccatcttatcgatggctctgctcctgggcaaaataggatcaatactggtgattaagcttatgcctttcagcggggattttgttcagggatttataagttatgtagggtctcattatagagaagtgaaccttgtataccctagatacagcaacttcatctctactgaatcttatttggttatgacagatctcaaggctaaccggctaatgaatcctgaaaagattaagcagcagataattgaatcatctgtgaggacttcacctggacttataggtcacatcctatccattaagcaactaagctgcatacaagcaattgtgggagacgcagttagtagaggtgatatcaatcctactctgaaaaaacttacacctatagagcaggtgctgatcaattgcgggttggcaattaacggacctaagctgtgcaaagaattgatccaccatgatgttgcctcagggcaagatggattgcttaattctatactcatcctctacagggagttggcaagattcaaagacaaccaaagaagtcaacaagggatgttccacgcttaccccgtattggtaagtagcaggcaacgagaacttatatctaggatcacccgcaaattctgggggcacattcttctttactccgggaacaaaaagttgataaataagtttatccagaatctcaagtccggctatctgatactagacttacaccagaatatcttcgttaagaatctatccaagtcagagaaacagattattatgacggggggtttgaaacgtgagtgggtttttaaggtaacagtcaaggagaccaaagaatggtataagttagtcggatacagtgccctgattaaggactaattggttgaactccggaaccctaatcctgccctaggtggttaggcattatttgcaatatattaaagaaaactttgaaaatacgaagtttctattcccagctttgtctggt

SEQ ID NO: 71 - DNA, 21588 bp, synthetic construct
  source 1..21588: mol_type = other DNA
accaaacaaagttgggtaaggatagttcaatcaatgatcatcttctagtgcacttaggattcaagatcctattatcagggacaagagcaggattagggatatccgagatggccacacttttaaggagcttagcattgttcaaaagaaacaaggacaaaccacccattacatcaggatccggtggagccatcagaggaatcaaacacattattatagtaccaatccctggagattcctcaattaccactcgatccagacttctggaccggttggtgaggttaattggaaacccggatgtgagcgggcccaaactaacaggggcactaataggtatattatccttatttgtggagtctccaggtcaattgattcagaggatcaccgatgaccctgacgttagcataaggctgttagaggttgtccagagtgaccagtcacaatctggccttaccttcgcatcaagaggtaccaacatggaggatgaggcggaccaatacttttcacatgatgatccaattagtagtgatcaatccaggttcggatggttcgggaacaaggaaatctcagatattgaagtgcaagaccctgagggattcaacatgattctgggtaccatcctagcccaaatttgggtcttgctcgcaaaggcggttacggccccagacacggcagctgattcggagctaagaaggtggataaagtacacccaacaaagaagggtagttggtgaatttagattggagagaaaatggttggatgtggtgaggaacaggattgccgaggacctctccttacgccgattcatggtcgctctaatcctggatatcaagagaacacccggaaacaaacccaggattgctgaaatgatatgtgacattgatacatatatcgtagaggcaggattagccagttttatcctgactattaagtttgggatagaaactatgtatcctgctcttggactgcatgaatttgctggtgagttatccacacttgagtccttgatgaacctttaccagcaaatgggggaaactgcaccctacatggtaatcctggagaactcaattcagaacaagttcagtgcaggatcataccctctgctctggagctatgccatgggagtaggagtggaacttgaaaactccatgggaggtttgaactttggccgatcttactttgatccagcatattttagattagggcaagagatggtaaggaggtcagctggaaaggtcagttccacattggcatctgaactcggtatcactgccgaggatgcaaggcttgtttcagagattgcaatgcatactactgaggacaagatcagtagagcggttggacccagacaagcccaagtatcatttctacacggtgatcaaagtgagaatgagctaccgagattggggggcaaggaagataggagggtcaaacagagtcgaggagaagccagggagagctacagagaaaccgggcccagcagagcaagtgatgcgagagctgcccatcttccaaccggcacacccctagacattgacactgcaacggagtccagccaagatccgcaggacagtcgaaggtcagctgacgccctgcttaggctgcaagccatggcaggaatctcggaagaacaaggctcagacacggacacccctatagtgtacaatgacagaaatcttctagactaggtgcgagaggccgagggccagaacaacatccgcctaccatccatcattgttataaaaaacttaggaaccaggtccacacagccgccagcccatcaaccatccactcccacgattggagccaatggcagaagagcaggcacgccatgtcaaaaacggactggaatgcatccgggctctcaaggccgagcccatcggctcactggccatcgaggaagctatggcagcatggtcagaaatatcagacaacccaggacaggagcgagccacctgcagggaagagaaggcaggcagttcgggtctcagcaaaccatgcctctcagcaattggatcaactgaaggcggtgcacctcgcatccgcggtcagggacctggagagagcgatgacgacgctgaaactttgggaatccccccaagaaatctccaggcatcaagcactgggttacagtgttattacgtttatgatcacagcggtgaagcggttaagggaatccaagatgctgactctatcatggttcaatcaggccttgatggtgatagcaccctctcaggaggagacaatgaatctgaaaacagcgatgtggatattggcgaacctgataccgagggatatgctatcactgaccggggatctgctcccatctctatggggttcagggcttctgatgttgaaactgcagaaggaggggagatccacgagctcctgagactccaatccagaggcaacaactttccgaagcttgggaaaactctcaatgttcctccgcccccggaccccggtagggccagcacttccgggacacccattaaaaagggcacagacgcgagattagcctcatttggaacggagatcgcgtctttattgacaggtggtgcaacccaatgtgctcgaaagtcaccctcggaaccatcagggccaggtgcacctgcggggaatgtccccgagtgtgtgagcaatgccgcactgatacaggagtggacacccgaatctggtaccacaatctccccgagatcccagaataatgaagaagggggagactattatgatgatgagctgttctctgatgtccaagatattaaaacagccttggccaaaatacacgaggataatcagaagataatctccaagctagaatcactgctgttattgaagggagaagttgagtcaattaagaagcagatcaacaggcaaaatatcagcatatccaccctggaaggacacctctcaagcatcatgatcgccattcctggacttgggaaggatcccaacgaccccactgcagatgtcgaaatcaatcccgacttgaaacccatcataggcagagattcaggccgagcactggccgaagttctcaagaaacccgttgccagccgacaactccaaggaatgacaaatggacggaccagttccagaggacagctgctgaaggaatttcagctaaagccgatcgggaaaaagatgagctcagccgtcgggtttgttcctgacaccggccctgcatcacgcagtgtaatccgctccattataaaatccagccggctagaggaggatcggaagcgttacctgatgactctccttgatgatatcaaaggagccaatgatcttgccaagttccaccagatgctgatgaagataataatgaagtagctacagctcaacttacctgccaaccccatgccagtcgacccaactagtacaacctaaatccattataaaaaacttaggagcaaagtgattgcctcccaaggtccacaatgacagagacctacgacttcgacaagtcggcatgggacatcaaagggtcgatcgctccgatacaacccaccacctacagtgatggcaggctggtgccccaggtcagagtcatagatcctggtctaggcgacaggaaggatgaatgctttatgtacatgtttctgctgggggttgttgaggacagcgattccctagggcctccaatcgggcgagcatttgggttcctgcccttaggtgttggcagatccacagcaaagcccgaaaaactcctcaaagaggccactgagcttgacatagttgttagacgtacagcagggctcaatgaaaaactggtgttctacaacaacaccccactaactctcctcacaccttggagaaaggtcctaacaacagggagtgtcttcaacgcaaaccaagtgtgcaatgcggttaatctgataccgctcgataccccgcagaggttccgtgttgtttatatgagcatcacccgtctttcggataacgggtattacaccgttcctagaagaatgctggaattcagatcggtcaatgcagtggccttcaacctgctggtgacccttaggattgacaaggcgataggccctgggaagatcatcgacaatacagagcaacttcctgaggcaacatttatggtccacatcgggaacttcaggagaaagaagagtgaagtctactctgccgattattgcaaaatgaaaatcgaaaagatgggcctggtttttgcacttggtgggatagggggcaccagtcttcacattagaagcacaggcaaaatgagcaagactctccatgcacaactcgggttcaagaagaccttatgttacccgctgatggatatcaatgaagaccttaatcgattactctggaggagcagatgcaagatagtaagaatccaggcagttttgcagccatcagttcctcaagaattccgcatttacgacgacgtgatcataaatgatgaccaaggactattcaaagttctgtagaccgtagtgcccagcaatgcccgaaaacgacccccctcacaatgacagccagaaggcccggacaaaaaagccccctccgaaagactccacggaccaagcgagaggccagccagcagccgacggcaagcgcgaacaccaggcggccccagcacagaacagccctgacacaaggccaccaccagccaccccaatctgcatcctcctcgtgggacccccgaggaccaacccccaaggctgcccccgatccaaaccaccaaccgcatccccaccacccccgggaaagaaacccccagcaattggaaggcccctccccctcttcctcaacacaagaactccacaaccgaaccgcacaagcgaccgaggtgacccaaccgcaggcatccgactccctagacagatcctctctccccggcaaactaaacaaaacttagggccaaggaacatacacacccaacagaacccagaccccggcccacggcgccgcgcccccaacccccgacaaccagagggagcccccaaccaatcccgccggctcccccggtgcccacaggcagggacaccaacccccgaacagacccagcacccaaccatcgacaatccaagacgggggggcccccccaaaaaaaggcccccaggggccgacagccagcaccgcgaggaagcccacccaccccacacacgaccacggcaaccaaaccagaacccagaccaccctgggccaccagctcccagactcggccatcaccccgcagaaaggaaaggccacaacccgcgcaccccagccccgatccggcggggagccacccaacccgaaccagcacccaagagcgatccccgaaggacccccgaaccgcaaaggacatcagtatcccacagcctctccaagtcccccggtctcctcctcttctcgaagggaccaaaagatcaatccaccacacccgacgacactcaactccccacccctaaaggagacaccgggaatcccagaatcaagactcatccaatgtccatcatgggtctcaaggtgaacgtctctgccatattcatggcagtactgttaactctccaaacacccaccggtcaaatccattggggcaatctctctaagataggggtggtaggaataggaagtgcaagctacaaagttatgactcgttccagccatcaatcattagtcataaaattaatgcccaatataactctcctcaataactgcacgagggtagagattgcagaatacaggagactactgagaacagttttggaaccaattagagatgcacttaatgcaatgacccagaatataagaccggttcagagtgtagcttcaagtaggagacacaagagatttgcgggagtagtcctggcaggtgcggccctaggcgttgccacagctgctcagataacagccggcattgcacttcaccagtccatgctgaactctcaagccatcgacaatctgagagcgagcctggaaactactaatcaggcaattgagacaatcagacaagcagggcaggagatgatattggctgttcagggtgtccaagactacatcaataatgagctgataccgtctatgaaccaactatcttgtgatttaatcggccagaagctcgggctcaaattgctcagatactatacagaaatcctgtcattatttggccccagtttacgggaccccatatctgcggagatatctatccaggctttgagctatgcgcttggaggagacatcaataaggtgttagaaaagctcggatacagtggaggtgatttactgggcatcttagagagcggaggaataaaggcccggataactcacgtcgacacagagtcctacttcattgtcctcagtatagcctatccgacgctgtccgagattaagggggtgattgtccaccggctagagggggtctcgtacaacataggctctcaagagtggtataccactgtgcccaagtatgttgcaacccaagggtaccttatctcgaattttgatgagtcatcgtgtactttcatgccagaggggactgtgtgcagccaaaatgccttgtacccgatgagtcctctgctccaagaatgcctccgggggtacaccaagtcctgtgctcgtacactcgtatccgggtcttttgggaaccggttcattttatcacaagggaacctaatagccaattgtgcatcaatcctttgcaagtgttacacaacaggaacgatcattaatcaagaccctgacaagatcctaacatacattgctgccgatcactgcccggtagtcgaggtgaacggcgtgaccatccaagtcgggagcaggaggtatccagacgctgtgtacttgcacagaattgacctcggtcctcccatatcattggagaggttggacgtagggacaaatctggggaatgcaattgctaagttggaggatgccaaggaattgttggagtcatcggaccagatattgaggagtatgaaaggtttatcgagcactagcatagtctacatcctgattgcagtgtgtcttggagggttgatagggatccccgctttaatatgttgctgcagggggcgttgtaacaaaaagggagaacaagttggtatgtcaagaccaggcctaaagcctgatcttacgggaacatcaaaatcctatgtaaggtcgctctgatcctctacaactcttgaaacacaaatgtcccacaagtctcctcttcgtcatcaagcaaccaccgcacccagcatcaagcccacctgaaattatctccggcttccctctggccgaacaatatcggtagttaatcaaaacttagggtgcaagatcatccacaatgtcaccacaacgagaccggataaatgccttctacaaagataacccccatcccaagggaagtaggatagtcattaacagagaacatcttatgattgatagaccttatgttttgctggctgttctgtttgtcatgtttctgagcttgatcgggttgctagccattgcaggcattagacttcatcgggcagccatctacaccgcagagatccataaaagcctcagcaccaatctagatgtaactaactcaatcgagcatcaggtcaaggacgtgctgacaccactcttcaaaatcatcggtgatgaagtgggcctgaggacacctcagagattcactgacctagtgaaattaatctctgacaagattaaattccttaatccggatagggagtacgacttcagagatctcacttggtgtatcaacccgccagagagaatcaaattggattatgatcaatactgtgcagatgtggctgctgaagagctcatgaatgcattggtgaactcaactctactggagaccagaacaaccaatcagttcctagctgtctcaaagggaaactgctcagggcccactacaatcagaggtcaattctcaaacatgtcgctgtccctgttagacttgtatttaggtcgaggttacaatgtgtcatctatagtcactatgacatcccagggaatgtatgggggaacttacctagtggaaaagcctaatctgagcagcaaaaggtcagagttgtcacaactgagcatgtaccgagtgtttgaagtaggtgttatcagaaatccgggtttgggggctccggtgttccatatgacaaactatcttgagcaaccagtcagtaatgatctcagcaactgtatggtggctttgggggagctcaaactcgcagccctttgtcacggggaagattctatcacaattccctatcagggatcagggaaaggtgtcagcttccagctcgtcaagctaggtgtctggaaatccccaaccgacatgcaatcctgggtccccttatcaacggatgatccagtgatagacaggctttacctctcatctcacagaggtgttatcgctgacaatcaagcaaaatgggctgtcccgacaacacgaacagatgacaagttgcgaatggagacatgcttccaacaggcgtgtaagggtaaaatccaagcactctgcgagaatcccgagtgggcaccattgaaggataacaggattccttcatacggggtcttgtctgttgatctgagtctgacagttgagcttaaaatcaaaattgcttcgggattcgggccattgatcacacacggttcagggatggacctatacaaatccaaccacaacaatgtgtattggctgactatcccgccaatgaagaacctagccttaggtgtaatcaacacattggagtggataccgagattcaaggttagtccctacctcttcactgtcccaattaaggaagcaggcgaagactgccatgccccaacatacctacctgcggaggtggatggtgatgtcaaactcagttccaatctggtgattctacctggtcaagatctccaatatgttttggcaacctacgatacttccagggttgaacatgctgtggtttattacgtttacagcccaagccgctcattttcttacttttatccttttaggttgcctataaagggggtccccatcgaattacaagtggaatgcttcacatgggaccaaaaactctggtgccgtcacttctgtgtgcttgcggactcagaatctggtggacatatcactcactctgggatggtgggcatgggagtcagctgcacagtcacccgggaagatggaaccaatcgcagatagggctgctagtgaaccaatcacatgatgtcacccagacatcaggcatacccactagtctaccctccatcattgttataaaaaacttaggaaccaggtccacacagccgccagcccatcaacgcgtacggccaccatgggtagacttacaagtggggtgggaactgccgcacttttggttgttgctgtgggcttgcgagtggtttgcgctaaatacgcactcgccgatccgtccctcaaaatggcagaccccaatcggtttcggggcaagaatttgccagtccttgaccagctgacagaccctccaggggttaagagagtgtatcacatccagccctcccttgaggaccccttccaacccccatctataccgatcaccgtgtattacgccgtgctcgaacgcgcttgcaggtctgtgttgctgcacgcaccatctgaggctccccagattgttagaggggcaagcgacgaagcgagaaagcacacttacaacctcaccatagcttggtaccgcatgggcgacaactgcgccatcccaatcactgttatggaatatactgagtgcccttacaataaatctctgggtgtgtgtcctattaggacacagcctcgctggagctactatgactccttctctgccgtgagtgaagataatttgggtttcctgatgcacgcacccgcctttgagacagcaggtacgtaccttaggcttgtaaaaatcaacgattggaccgagataacccagtttattctggagcacagggctagagcatcctgtaaatacgcgttgccactccggataccaccagccgcttgcttgacctccaaggcttatcaacagggcgtaacggtggattccatcggcatgctccctaggttcatccctgaaaatcaaagaacggtggcactgtattcactcaagattgccggctggcacggccctaagccaccatacacctctactctgctgcccccggagctgagtgataccactaacgcaacccagcctgaactggtgccagaggatcctgaagattctgcattgctggaagacccagccggcactgtgtctagtcaaattccccctaattggcacataccgagcattcaggacgttgctccacaccacgctccggctgctccaagcaatcctggcctgataataggtgcattggccggttctaccctcgccgtcctggtgattgggggtatcgccttctgggttaggaggagagctcaaatggcccccaagcgcttgaggttgccgcacataagagacgacgacgcccccccttctcaccagcctctgttttattagttcgaactacagctcaacttacctgccaaccccatgccagtcgacccaactagtacaacctaaatccattataaaaaacttaggaaccaggtccacacagccgccagcccatcaaccatccactcccacgattggaggccggccatgagaggcggaggccttgtttgtgctttggtggttggtgcacttgtggccgcagtagcttcagctgctccagccgcacctagagcttctggtggagttgctgctactgttgcagctaacggcggacctgcctcacaaccaccccctgttccctcccctgcaactaccaaagcccggaagaggaagactaaaaagccacctaagagaccagaggccacaccaccacctgacgctaacgcaaccgttgcagctgggcacgcgaccttgagggctcacctgcgagagataaaagtcgaaaacgccgacgctcagttctacgtctgccctccacctaccggagcaactgtagttcaatttgaacagccacggaggtgcccgacaagaccagaaggacagaattacaccgaaggaatagccgtggtctttaaagagaatatcgccccttacaagttcaaggctacaatgtactacaaggacgtgaccgtctcacaggtgtggtttgggcacagatattcacagtttatgggaatcttcgaagatagagccccggtgcccttcgaagaggtgatcgataagataaacgctaagggcgtgtgcagatccaccgccaagtatgtgcgaaacaatatggaaactaccgctttccaccgagacgatcacgagaccgatatggagctgaagcctgccaaagtagccacgcgaacctcccgcggctggcacactaccgatctgaagtataaccctagccgcgttgaagcgttccacaggtacggtaccacagtaaactgtatcgtggaggaagttgacgctcgcagcgtgtacccctacgacgaattcgtgctggccaccggcgatttcgtatatatgtcacctttctacggatatcgcgagggcagccacacggaacacacctcttacgctgccgatcggttcaagcaagtcgacggtttttacgctagagacctgaccaccaaggcacgggcaacctcccctacaactaggaaccttcttactaccccaaaatttaccgtagcttgggactgggtgcctaagaggccagcagtctgcactatgactaagtggcaagaagtggacgaaatgctgagagctgagtacggcgggagttttaggttctcttccgacgctatttccaccacctttaccactaatctgactcaatatagtctgtctcgagtggacctgggcgattgtattggtcgagacgcacgcgaagctattgaccgaatgtttgcccgcaaatacaacgctacccacataaaggtaggccagcctcagtattacctggctactggaggctttctgattgcttaccagcccttgcttagtaatacccttgccgagctctacgttagagagtatatgcgcgagcaggatcgcaaacctcggaacgctacacctgcaccccttcgcgaagctccctctgcaaacgcctccgtagaacggatcaagaccacctcctctatcgagtttgcccggctccagtttacctacaatcacatccagcgacacgtgaacgatatgctcggaaggatcgcagtcgcgtggtgtgaactgcagaaccacgagctgactctgtggaacgaagcccggaaactgaatcctaacgctatcgcttctgccaccgtagggcgaagggtttctgctaggatgctcggtgacgtgatggccgtctccacttgtgttcctgtagctcccgacaacgtgatcgtgcagaattctatgcgagtaagcagtaggccaggtacctgctattcccgacctctggttagcttccggtacgaggaccaggggcctctgatcgaaggacagctcggagagaacaatgaattgagactgaccagagacgcactggagccgtgtactgtcggccacaggcgatattttatctttggaggggggtacgtctatttcgaggagtatgcctactcccaccaattgagcagggctgacgttacaacagtttccacgtttgctgacttgaatatcacgatgctcgaagacgcagaggcagtgcctctcgaggtttacacacgacacgagattaaagatagcgggctgctggactatactgaagtgcagagacgcaaccagctccacgacttgaggtttgctgatattgacaccgtgatcagggctgacgccaacgctgctatgttcgctggcttgtgtgctttcttcgagggaatgggtgacctgggcagagccgtgggtaaggtcgtaatgggcgtcgtgggcggagtagtaagtgccgtctccggagtatcaagctttatgtcaaaccccttcggcgctctggcggttggtcttctcgttttggcaggtcttgtagccgccttcttcgctttccgctatgtgctgcagctccaacggaatcctatgaaagctctgtaccccctgacaactaaggagctgaaaacttccgatcctggtggtgtaggcggtgaaggtgaagaaggagcagagggggggggctttgatgaagccaagctcgccgaagcacgcgaaatgattagatatatggccctggtgtctgctatggagagaacagaacacaaagctagaaagaaaggcacctctgccctgctctcttctaaggtcacaaatatggtgctcaggaagcggaataaggctagatattctccactgcacaatgaagacgaggccggagacgaagacgagttgtgactattcgaactactcagctagtctacgcgccgtagcctaccctccatcattgttataaaaaacttaggagcaaagtccacacagccgccgataaggtccacaatggcattgggtagagttggtttggctgtgggactttggggtctcctctgggtcggtgtggttgtcgtactggctaacgcttctccaggccgcactattactgttggaccgagagggaacgcttccaacgctgctccctctgcctcccctaggaacgcttctgctcctagaactacacctactccaccgcaaccccgcaaagcaaccaaaagcaaggcctcaaccgctaaaccagctcctccaccgaagacaggcccacctaaaaccagcagcgagcccgtgcggtgtaatcgacacgatcccctggcccgatacggtagtcgggtgcaaatccgctgtaggtttcctaatagtactagaacagaaagcaggctgcagatctggagatacgccactgccactgacgcagaaatcgggaccgccccttcccttgaggaggtgatggtgaacgtaagcgctccaccaggaggtcagctcgtctacgactcagcacccaataggaccgatccacacgtgatttgggcagaaggagctggaccaggcgcctctccaaggttgtattccgttgtaggcccactgggtcggcagagactgattatcgaagaactgactctggaaacccagggaatgtactattgggtttggggaaggactgataggcctagtgcttacggtacttgggtgagagtcagggtatttcggcctccttccctgactatacacccacacgcagtgctcgagggtcagcctttcaaggccacttgcacagccgcaacttactaccctgggaaccgagcagagtttgtgtggtttgaagacgggcggagagtttttgaccccgcacagatccacacgcagacccaggaaaaccctgacggattctccaccgttagcactgtgacctctgccgcagttggaggacaaggaccgccaaggaccttcacctgtcagctgacctggcaccgcgactctgtttcagcgtctagacggaacgcgagcggtactgcctctgtgctccccagacccacaatcacaatggagttcaccggcgatcacgccgtgtgtacggctggttgtgtacccgaaggcgtgacctttgcttggtttttgggagacgatagctcacctgccgagaaagtcgcagtggcttcacaaacttcctgcggaaggcccgggactgccactatccgatctacgctccccgtgtcttacgagcagacagaatatatttgccgactggcaggatatccagacggaatacccgtcctggaacaccacggttctcaccagcctccaccgagagatccaaccgagcgacaggtaatcagagccgtggaaggagcgggtattggcgtggcagttctcgttgctgtcgtacttgccggcacggctgttgtgtatctcactcacgccagcagcgtgcgatacaggcgcctcagatgataagcgcgcagcgcttagacgtctcgcgatcgatgctagtgtgaaatagacatcagaattaagaaaaacgtagggtccaagtggttccccgttatggactcgctatctgtcaaccagatcttataccctgaagttcacctagatagcccgatagttaccaataagatagtagccatcctggagtatgctcgagtccctcacgcttacagcctggaggaccctacactgtgtcagaacatcaagcaccgcctaaaaaacggattttccaaccaaatgattataaacaatgtggaagttgggaatgtcatcaagtccaagcttaggagttatccggcccactctcatattccatatccaaattgtaatcaggatttatttaacatagaagacaaagagtcaacgaggaagatccgtgaactcctcaaaaaggggaattcgctgtactccaaagtcagtgataaggttttccaatgcttaagggacactaactcacggcttggcctaggctccgaattgagggaggacatcaaggagaaagttattaacttgggagtttacatgcacagctcccagtggtttgagccctttctgttttggtttacagtcaagactgagatgaggtcagtgattaaatcacaaacccatacttgccataggaggagacacacacctgtattcttcactggtagttcagttgagttgctaatctctcgtgaccttgttgctataatcagtaaagagtctcaacatgtatattacctgacatttgaactggttttgatgtattgtgatgtcatagaggggaggttaatgacagagaccgctatgactattgatgctaggtatacagagcttctaggaagagtcagatacatgtggaaactgatagatggtttcttccctgcactcgggaatccaacttatcaaattgtagccatgctggagcctctttcacttgcttacctgcagctgagggatataacagtagaactcagaggtgctttccttaaccactgctttactgaaatacatgatgttcttgaccaaaacgggttttctgatgaaggtacttatcatgagttaactgaagctctagattacattttcataactgatgacatacatctgacaggggagattttctcatttttcagaagtttcggccaccccagacttgaagcagtaacggctgctgaaaatgttaggaaatacatgaatcagcctaaagtcattgtgtatgagactctgatgaaaggtcatgccatattttgtggaatcataatcaacggctatcgtgacaggcacggaggcagttggccaccgctgaccctccccctgcatgctgcagacacaatccggaatgctcaagcttcaggtgaagggttaacacatgagcagtgcgttgataactggaaatcttttgctggagtgaaatttggctgctttatgcctcttagcctggatagtgatctgacaatgtacctaaaggacaaggcacttgctgctctccaaagggaatgggattcagtttacccgaaagagttcctgcgttacgaccctcccaagggaaccgggtcacggaggcttgtagatgttttccttaatgattcgagctttgacccatatgatgtgataatgtatgttgtaagtggagcttacctccatgaccctgagttcaacctgtcttacagcctgaaagaaaaggagatcaaggaaacaggtagactttttgctaaaatgacttacaaaatgagggcatgccaagtgattgctgaaaatctaatctcaaacgggattggcaaatattttaaggacaatgggatggccaaggatgagcacgatttgactaaggcactccacactctagctgtctcaggagtccccaaagatctcaaagaaagtcacaggggggggccagtcttaaaaacctactcccgaagcccagtccacacaagtaccaggaacgtgagagcagcaaaagggtttatagggttccctcaagtaattcggcaggaccaagacactgatcatccggagaatatggaagcttacgagacagtcagtgcatttatcacgactgatctcaagaagtactgccttaattggagatatgagaccatcagcttgtttgcacagaggctaaatgagatttacggattgccctcatttttccagtggctgcataagaggcttgagacctctgtcctgtatgtaagtgaccctcattgcccccccgaccttgacgcccatatcccgttatataaagtccccaatgatcaaatcttcattaagtaccctatgggaggtatagaagggtattgtcagaagctgtggaccatcagcaccattccctatctatacctggctgcttatgagagcggagtaaggattgcttcgttagtgcaaggggacaatcagaccatagccgtaacaaaaagggtacccagcacatggccctacaaccttaagaaacgggaagctgctagagtaactagagattactttgtaattcttaggcaaaggctacatgatattggccatcacctcaaggcaaatgagacaattgtttcatcacatttttttgtctattcaaaaggaatatattatgatgggctacttgtgtcccaatcactcaagagcatcgcaagatgtgtattctggtcagagactatagttgatgaaacaagggcagcatgcagtaatattgctacaacaatggctaaaagcatcgagagaggttatgaccgttaccttgcatattccctgaacgtcctaaaagtgatacagcaaattctgatctctcttggcttcacaatcaattcaaccatgacccgggatgtagtcatacccctcctcacaaacaacgacctcttaataaggatggcactgttgcccgctcctattggggggatgaattatctgaatatgagcaggctgtttgtcagaaacatcggtgatccagtaacatcatcaattgctgatctcaagagaatgattctcgcctcactaatgcctgaagagaccctccatcaagtaatgacacaacaaccgggggactcttcattcctagactgggctagcgacccttactcagcaaatcttgtatgtgtccagagcatcactagactcctcaagaacataactgcaaggtttgtcctgatccatagtccaaacccaatgttaaaaggattattccatgatgacagtaaagaagaggacgagggactggcggcattcctcatggacaggcatattatagtacctagggcagctcatgaaatcctggatcatagtgtcacaggggcaagagagtctattgcaggcatgctggataccacaaaaggcttgattcgagccagcatgaggaagggggggttaacctctcgagtgataaccagattgtccaattatgactatgaacaattcagagcagggatggtgctattgacaggaagaaagagaaatgtcctcattgacaaagagtcatgttcagtgcagctggcgagagctctaagaagccatatgtgggcgaggctagctcgaggacggcctatttacggccttgaggtccctgatgtactagaatctatgcgaggccaccttattcggcgtcatgagacatgtgtcatctgcgagtgtggatcagtcaactacggatggttttttgtcccctcgggttgccaactggatgatattgacaaggaaacatcatccttgagagtcccatatattggttctaccactgatgagagaacagacatgaagcttgccttcgtaagagccccaagtcgatccttgcgatctgctgttagaatagcaacagtgtactcatgggcttacggtgatgatgatagctcttggaacgaagcctggttgttggctaggcaaagggccaatgtgagcctggaggagctaagggtgatcactcccatctcaacttcgactaatttagcgcataggttgagggatcgtagcactcaagtgaaatactcaggtacatcccttgtccgagtggcgaggtataccacaatctccaacgacaatctctcatttgtcatatcagataagaaggttgatactaactttatataccaacaaggaatgcttctagggttgggtgttttagaaacattgtttcgactcgagaaagataccggatcatctaacacggtattacatcttcacgtcgaaacagattgttgcgtgatcccgatgatagatcatcccaggatacccagctcccgcaagctagagctgagggcagagctatgtaccaacccattgatatatgataatgcacctttaattgacagagatgcaacaaggctatacacccagagccataggaggcaccttgtggaatttgttacatggtccacaccccaactatatcacattttagctaagtccacagcactatctatgattgacctggtaacaaaatttgagaaggaccatatgaatgaaatttcagctctcataggggatgacgatatcaatagtttcataactgagtttctgctcatagagccaagattattcactatctacttgggccagtgtgcggccatcaattgggcatttgatgtacattatcatagaccatcagggaaatatcagatgggtgagctgttgtcatcgttcctttctagaatgagcaaaggagtgtttaaggtgcttgtcaatgctctaagccacccaaagatctacaagaaattctggcattgtggtattatagagcctatccatggtccttcacttgatgctcaaaacttgcacacaactgtgtgcaacatggtttacacatgctatatgacctacctcgacctgttgttgaatgaagagttagaagagttcacatttctcttgtgtgaaagcgacgaggatgtagtaccggacagattcgacaacatccaggcaaaacacttatgtgttctggcagatttgtactgtcaaccagggacctgcccaccaattcgaggtctaagaccggtagagaaatgtgcagttctaaccgaccatatcaaggcagaggctatgttatctccagcaggatcttcgtggaacataaatccaattattgtagaccattactcatgctctctgacttatctccggcgaggatcgatcaaacagataagattgagagttgatccaggattcattttcgacgccctcgctgaggtaaatgtcagtcagccaaagatcggcagcaacaacatctcaaatatgagcatcaaggctttcagacccccacacgatgatgttgcaaaattgctcaaagatatcaacacaagcaagcacaatcttcccatttcagggggcaatctcgccaattatgaaatccatgctttccgcagaatcgggttgaactcatctgcttgctacaaagctgttgagatatcaacattaattaggagatgccttgagccaggggaggacggcttgttcttgggtgagggatcgggttctatgttgatcacttataaagagatacttaaactaaacaagtgcttctataatagtggggtttccgccaattctagatctggtcaaagggaattagcaccctatccctccgaagttggccttgtcgaacacagaatgggagtaggtaatattgtcaaagtgctctttaacgggaggcccgaagtcacgtgggtaggcagtgtagattgcttcaatttcatagttagtaatatccctacctctagtgtggggtttatccattcagatatagagaccttgcctgacaaagatactatagagaagctagaggaattggcagccatcttatcgatggctctgctcctgggcaaaataggatcaatactggtgattaagcttatgcctttcagcggggattttgttcagggatttataagttatgtagggtctcattatagagaagtgaaccttgtataccctagatacagcaacttcatctctactgaatcttatttggttatgacagatctcaaggctaaccggctaatgaatcctgaaaagattaagcagcagataattgaatcatctgtgaggacttcacctggacttataggtcacatcctatccattaagcaactaagctgcatacaagcaattgtgggagacgcagttagtagaggtgatatcaatcctactctgaaaaaacttacacctatagagcaggtgctgatcaattgcgggttggcaattaacggacctaagctgtgcaaagaattgatccaccatgatgttgcctcagggcaagatggattgcttaattctatactcatcctctacagggagttggcaagattcaaagacaaccaaagaagtcaacaagggatgttccacgcttaccccgtattggtaagtagcaggcaacgagaacttatatctaggatcacccgcaaattctgggggcacattcttctttactccgggaacaaaaagttgataaataagtttatccagaatctcaagtccggctatctgatactagacttacaccagaatatcttcgttaagaatctatccaagtcagagaaacagattattatgacggggggtttgaaacgtgagtgggtttttaaggtaacagtcaaggagaccaaagaatggtataagttagtcggatacagtgccctgattaaggactaattggttgaactccggaaccctaatcctgccctaggtggttaggcattatttgcaatatattaaagaaaactttgaaaatacgaagtttctattcccagctttgtctggt

SEQ ID NO: 72 - DNA, 21444 bp, synthetic construct
  source 1..21444: mol_type = other DNA
accaaacaaagttgggtaaggatagttcaatcaatgatcatcttctagtgcacttaggattcaagatcctattatcagggacaagagcaggattagggatatccgagatggccacacttttaaggagcttagcattgttcaaaagaaacaaggacaaaccacccattacatcaggatccggtggagccatcagaggaatcaaacacattattatagtaccaatccctggagattcctcaattaccactcgatccagacttctggaccggttggtgaggttaattggaaacccggatgtgagcgggcccaaactaacaggggcactaataggtatattatccttatttgtggagtctccaggtcaattgattcagaggatcaccgatgaccctgacgttagcataaggctgttagaggttgtccagagtgaccagtcacaatctggccttaccttcgcatcaagaggtaccaacatggaggatgaggcggaccaatacttttcacatgatgatccaattagtagtgatcaatccaggttcggatggttcgggaacaaggaaatctcagatattgaagtgcaagaccctgagggattcaacatgattctgggtaccatcctagcccaaatttgggtcttgctcgcaaaggcggttacggccccagacacggcagctgattcggagctaagaaggtggataaagtacacccaacaaagaagggtagttggtgaatttagattggagagaaaatggttggatgtggtgaggaacaggattgccgaggacctctccttacgccgattcatggtcgctctaatcctggatatcaagagaacacccggaaacaaacccaggattgctgaaatgatatgtgacattgatacatatatcgtagaggcaggattagccagttttatcctgactattaagtttgggatagaaactatgtatcctgctcttggactgcatgaatttgctggtgagttatccacacttgagtccttgatgaacctttaccagcaaatgggggaaactgcaccctacatggtaatcctggagaactcaattcagaacaagttcagtgcaggatcataccctctgctctggagctatgccatgggagtaggagtggaacttgaaaactccatgggaggtttgaactttggccgatcttactttgatccagcatattttagattagggcaagagatggtaaggaggtcagctggaaaggtcagttccacattggcatctgaactcggtatcactgccgaggatgcaaggcttgtttcagagattgcaatgcatactactgaggacaagatcagtagagcggttggacccagacaagcccaagtatcatttctacacggtgatcaaagtgagaatgagctaccgagattggggggcaaggaagataggagggtcaaacagagtcgaggagaagccagggagagctacagagaaaccgggcccagcagagcaagtgatgcgagagctgcccatcttccaaccggcacacccctagacattgacactgcaacggagtccagccaagatccgcaggacagtcgaaggtcagctgacgccctgcttaggctgcaagccatggcaggaatctcggaagaacaaggctcagacacggacacccctatagtgtacaatgacagaaatcttctagactaggtgcgagaggccgagggccagaacaacatccgcctaccatccatcattgttataaaaaacttaggaaccaggtccacacagccgccagcccatcaaccatccactcccacgattggagccaatggcagaagagcaggcacgccatgtcaaaaacggactggaatgcatccgggctctcaaggccgagcccatcggctcactggccatcgaggaagctatggcagcatggtcagaaatatcagacaacccaggacaggagcgagccacctgcagggaagagaaggcaggcagttcgggtctcagcaaaccatgcctctcagcaattggatcaactgaaggcggtgcacctcgcatccgcggtcagggacctggagagagcgatgacgacgctgaaactttgggaatccccccaagaaatctccaggcatcaagcactgggttacagtgttattacgtttatgatcacagcggtgaagcggttaagggaatccaagatgctgactctatcatggttcaatcaggccttgatggtgatagcaccctctcaggaggagacaatgaatctgaaaacagcgatgtggatattggcgaacctgataccgagggatatgctatcactgaccggggatctgctcccatctctatggggttcagggcttctgatgttgaaactgcagaaggaggggagatccacgagctcctgagactccaatccagaggcaacaactttccgaagcttgggaaaactctcaatgttcctccgcccccggaccccggtagggccagcacttccgggacacccattaaaaagggcacagacgcgagattagcctcatttggaacggagatcgcgtctttattgacaggtggtgcaacccaatgtgctcgaaagtcaccctcggaaccatcagggccaggtgcacctgcggggaatgtccccgagtgtgtgagcaatgccgcactgatacaggagtggacacccgaatctggtaccacaatctccccgagatcccagaataatgaagaagggggagactattatgatgatgagctgttctctgatgtccaagatattaaaacagccttggccaaaatacacgaggataatcagaagataatctccaagctagaatcactgctgttattgaagggagaagttgagtcaattaagaagcagatcaacaggcaaaatatcagcatatccaccctggaaggacacctctcaagcatcatgatcgccattcctggacttgggaaggatcccaacgaccccactgcagatgtcgaaatcaatcccgacttgaaacccatcataggcagagattcaggccgagcactggccgaagttctcaagaaacccgttgccagccgacaactccaaggaatgacaaatggacggaccagttccagaggacagctgctgaaggaatttcagctaaagccgatcgggaaaaagatgagctcagccgtcgggtttgttcctgacaccggccctgcatcacgcagtgtaatccgctccattataaaatccagccggctagaggaggatcggaagcgttacctgatgactctccttgatgatatcaaaggagccaatgatcttgccaagttccaccagatgctgatgaagataataatgaagtagctacagctcaacttacctgccaaccccatgccagtcgacccaactagtacaacctaaatccattataaaaaacttaggagcaaagtgattgcctcccaaggtccacaatgacagagacctacgacttcgacaagtcggcatgggacatcaaagggtcgatcgctccgatacaacccaccacctacagtgatggcaggctggtgccccaggtcagagtcatagatcctggtctaggcgacaggaaggatgaatgctttatgtacatgtttctgctgggggttgttgaggacagcgattccctagggcctccaatcgggcgagcatttgggttcctgcccttaggtgttggcagatccacagcaaagcccgaaaaactcctcaaagaggccactgagcttgacatagttgttagacgtacagcagggctcaatgaaaaactggtgttctacaacaacaccccactaactctcctcacaccttggagaaaggtcctaacaacagggagtgtcttcaacgcaaaccaagtgtgcaatgcggttaatctgataccgctcgataccccgcagaggttccgtgttgtttatatgagcatcacccgtctttcggataacgggtattacaccgttcctagaagaatgctggaattcagatcggtcaatgcagtggccttcaacctgctggtgacccttaggattgacaaggcgataggccctgggaagatcatcgacaatacagagcaacttcctgaggcaacatttatggtccacatcgggaacttcaggagaaagaagagtgaagtctactctgccgattattgcaaaatgaaaatcgaaaagatgggcctggtttttgcacttggtgggatagggggcaccagtcttcacattagaagcacaggcaaaatgagcaagactctccatgcacaactcgggttcaagaagaccttatgttacccgctgatggatatcaatgaagaccttaatcgattactctggaggagcagatgcaagatagtaagaatccaggcagttttgcagccatcagttcctcaagaattccgcatttacgacgacgtgatcataaatgatgaccaaggactattcaaagttctgtagaccgtagtgcccagcaatgcccgaaaacgacccccctcacaatgacagccagaaggcccggacaaaaaagccccctccgaaagactccacggaccaagcgagaggccagccagcagccgacggcaagcgcgaacaccaggcggccccagcacagaacagccctgacacaaggccaccaccagccaccccaatctgcatcctcctcgtgggacccccgaggaccaacccccaaggctgcccccgatccaaaccaccaaccgcatccccaccacccccgggaaagaaacccccagcaattggaaggcccctccccctcttcctcaacacaagaactccacaaccgaaccgcacaagcgaccgaggtgacccaaccgcaggcatccgactccctagacagatcctctctccccggcaaactaaacaaaacttagggccaaggaacatacacacccaacagaacccagaccccggcccacggcgccgcgcccccaacccccgacaaccagagggagcccccaaccaatcccgccggctcccccggtgcccacaggcagggacaccaacccccgaacagacccagcacccaaccatcgacaatccaagacgggggggcccccccaaaaaaaggcccccaggggccgacagccagcaccgcgaggaagcccacccaccccacacacgaccacggcaaccaaaccagaacccagaccaccctgggccaccagctcccagactcggccatcaccccgcagaaaggaaaggccacaacccgcgcaccccagccccgatccggcggggagccacccaacccgaaccagcacccaagagcgatccccgaaggacccccgaaccgcaaaggacatcagtatcccacagcctctccaagtcccccggtctcctcctcttctcgaagggaccaaaagatcaatccaccacacccgacgacactcaactccccacccctaaaggagacaccgggaatcccagaatcaagactcatccaatgtccatcatgggtctcaaggtgaacgtctctgccatattcatggcagtactgttaactctccaaacacccaccggtcaaatccattggggcaatctctctaagataggggtggtaggaataggaagtgcaagctacaaagttatgactcgttccagccatcaatcattagtcataaaattaatgcccaatataactctcctcaataactgcacgagggtagagattgcagaatacaggagactactgagaacagttttggaaccaattagagatgcacttaatgcaatgacccagaatataagaccggttcagagtgtagcttcaagtaggagacacaagagatttgcgggagtagtcctggcaggtgcggccctaggcgttgccacagctgctcagataacagccggcattgcacttcaccagtccatgctgaactctcaagccatcgacaatctgagagcgagcctggaaactactaatcaggcaattgagacaatcagacaagcagggcaggagatgatattggctgttcagggtgtccaagactacatcaataatgagctgataccgtctatgaaccaactatcttgtgatttaatcggccagaagctcgggctcaaattgctcagatactatacagaaatcctgtcattatttggccccagtttacgggaccccatatctgcggagatatctatccaggctttgagctatgcgcttggaggagacatcaataaggtgttagaaaagctcggatacagtggaggtgatttactgggcatcttagagagcggaggaataaaggcccggataactcacgtcgacacagagtcctacttcattgtcctcagtatagcctatccgacgctgtccgagattaagggggtgattgtccaccggctagagggggtctcgtacaacataggctctcaagagtggtataccactgtgcccaagtatgttgcaacccaagggtaccttatctcgaattttgatgagtcatcgtgtactttcatgccagaggggactgtgtgcagccaaaatgccttgtacccgatgagtcctctgctccaagaatgcctccgggggtacaccaagtcctgtgctcgtacactcgtatccgggtcttttgggaaccggttcattttatcacaagggaacctaatagccaattgtgcatcaatcctttgcaagtgttacacaacaggaacgatcattaatcaagaccctgacaagatcctaacatacattgctgccgatcactgcccggtagtcgaggtgaacggcgtgaccatccaagtcgggagcaggaggtatccagacgctgtgtacttgcacagaattgacctcggtcctcccatatcattggagaggttggacgtagggacaaatctggggaatgcaattgctaagttggaggatgccaaggaattgttggagtcatcggaccagatattgaggagtatgaaaggtttatcgagcactagcatagtctacatcctgattgcagtgtgtcttggagggttgatagggatccccgctttaatatgttgctgcagggggcgttgtaacaaaaagggagaacaagttggtatgtcaagaccaggcctaaagcctgatcttacgggaacatcaaaatcctatgtaaggtcgctctgatcctctacaactcttgaaacacaaatgtcccacaagtctcctcttcgtcatcaagcaaccaccgcacccagcatcaagcccacctgaaattatctccggcttccctctggccgaacaatatcggtagttaatcaaaacttagggtgcaagatcatccacaatgtcaccacaacgagaccggataaatgccttctacaaagataacccccatcccaagggaagtaggatagtcattaacagagaacatcttatgattgatagaccttatgttttgctggctgttctgtttgtcatgtttctgagcttgatcgggttgctagccattgcaggcattagacttcatcgggcagccatctacaccgcagagatccataaaagcctcagcaccaatctagatgtaactaactcaatcgagcatcaggtcaaggacgtgctgacaccactcttcaaaatcatcggtgatgaagtgggcctgaggacacctcagagattcactgacctagtgaaattaatctctgacaagattaaattccttaatccggatagggagtacgacttcagagatctcacttggtgtatcaacccgccagagagaatcaaattggattatgatcaatactgtgcagatgtggctgctgaagagctcatgaatgcattggtgaactcaactctactggagaccagaacaaccaatcagttcctagctgtctcaaagggaaactgctcagggcccactacaatcagaggtcaattctcaaacatgtcgctgtccctgttagacttgtatttaggtcgaggttacaatgtgtcatctatagtcactatgacatcccagggaatgtatgggggaacttacctagtggaaaagcctaatctgagcagcaaaaggtcagagttgtcacaactgagcatgtaccgagtgtttgaagtaggtgttatcagaaatccgggtttgggggctccggtgttccatatgacaaactatcttgagcaaccagtcagtaatgatctcagcaactgtatggtggctttgggggagctcaaactcgcagccctttgtcacggggaagattctatcacaattccctatcagggatcagggaaaggtgtcagcttccagctcgtcaagctaggtgtctggaaatccccaaccgacatgcaatcctgggtccccttatcaacggatgatccagtgatagacaggctttacctctcatctcacagaggtgttatcgctgacaatcaagcaaaatgggctgtcccgacaacacgaacagatgacaagttgcgaatggagacatgcttccaacaggcgtgtaagggtaaaatccaagcactctgcgagaatcccgagtgggcaccattgaaggataacaggattccttcatacggggtcttgtctgttgatctgagtctgacagttgagcttaaaatcaaaattgcttcgggattcgggccattgatcacacacggttcagggatggacctatacaaatccaaccacaacaatgtgtattggctgactatcccgccaatgaagaacctagccttaggtgtaatcaacacattggagtggataccgagattcaaggttagtccctacctcttcactgtcccaattaaggaagcaggcgaagactgccatgccccaacatacctacctgcggaggtggatggtgatgtcaaactcagttccaatctggtgattctacctggtcaagatctccaatatgttttggcaacctacgatacttccagggttgaacatgctgtggtttattacgtttacagcccaagccgctcattttcttacttttatccttttaggttgcctataaagggggtccccatcgaattacaagtggaatgcttcacatgggaccaaaaactctggtgccgtcacttctgtgtgcttgcggactcagaatctggtggacatatcactcactctgggatggtgggcatgggagtcagctgcacagtcacccgggaagatggaaccaatcgcagatagggctgctagtgaaccaatcacatgatgtcacccagacatcaggcatacccactagtctaccctccatcattgttataaaaaacttaggaaccaggtccacacagccgccagcccatcaacgcgtacggccaccatgggtagacttacaagtggggtgggaactgccgcacttttggttgttgctgtgggcttgcgagtggtttgcgctaaatacgcactcgccgatccgtccctcaaaatggcagaccccaatcggtttcggggcaagaatttgccagtccttgaccagctgacagaccctccaggggttaagagagtgtatcacatccagccctcccttgaggaccccttccaacccccatctataccgatcaccgtgtattacgccgtgctcgaacgcgcttgcaggtctgtgttgctgcacgcaccatctgaggctccccagattgttagaggggcaagcgacgaagcgagaaagcacacttacaacctcaccatagcttggtaccgcatgggcgacaactgcgccatcccaatcactgttatggaatatactgagtgcccttacaataaatctctgggtgtgtgtcctattaggacacagcctcgctggagctactatgactccttctctgccgtgagtgaagataatttgggtttcctgatgcacgcacccgcctttgagacagcaggtacgtaccttaggcttgtaaaaatcaacgattggaccgagataacccagtttattctggagcacagggctagagcatcctgtaaatacgcgttgccactccggataccaccagccgcttgcttgacctccaaggcttatcaacagggcgtaacggtggattccatcggcatgctccctaggttcatccctgaaaatcaaagaacggtggcactgtattcactcaagattgccggctggcacggccctaagccaccatacacctctactctgctgcccccggagctgagtgataccactaacgcaacccagcctgaactggtgccagaggatcctgaagattctgcattgctggaagacccagccggcactgtgtctagtcaaattccccctaattggcacataccgagcattcaggacgttgctccacaccacgctccggctgctccaagcaatcctggcctgataataggtgcattggccggttctaccctcgccgtcctggtgattgggggtatcgccttctgggttaggaggagagctcaaatggcccccaagcgcttgaggttgccgcacataagagacgacgacgcccccccttctcaccagcctctgttttatgcgacgaacttctcactgcttaagcaagcaggagacgtggaggagaatccgggcccaatgagaggcggaggccttgtttgtgctttggtggttggtgcacttgtggccgcagtagcttcagctgctccagccgcacctagagcttctggtggagttgctgctactgttgcagctaacggcggacctgcctcacaaccaccccctgttccctcccctgcaactaccaaagcccggaagaggaagactaaaaagccacctaagagaccagaggccacaccaccacctgacgctaacgcaaccgttgcagctgggcacgcgaccttgagggctcacctgcgagagataaaagtcgaaaacgccgacgctcagttctacgtctgccctccacctaccggagcaactgtagttcaatttgaacagccacggaggtgcccgacaagaccagaaggacagaattacaccgaaggaatagccgtggtctttaaagagaatatcgccccttacaagttcaaggctacaatgtactacaaggacgtgaccgtctcacaggtgtggtttgggcacagatattcacagtttatgggaatcttcgaagatagagccccggtgcccttcgaagaggtgatcgataagataaacgctaagggcgtgtgcagatccaccgccaagtatgtgcgaaacaatatggaaactaccgctttccaccgagacgatcacgagaccgatatggagctgaagcctgccaaagtagccacgcgaacctcccgcggctggcacactaccgatctgaagtataaccctagccgcgttgaagcgttccacaggtacggtaccacagtaaactgtatcgtggaggaagttgacgctcgcagcgtgtacccctacgacgaattcgtgctggccaccggcgatttcgtatatatgtcacctttctacggatatcgcgagggcagccacacggaacacacctcttacgctgccgatcggttcaagcaagtcgacggtttttacgctagagacctgaccaccaaggcacgggcaacctcccctacaactaggaaccttcttactaccccaaaatttaccgtagcttgggactgggtgcctaagaggccagcagtctgcactatgactaagtggcaagaagtggacgaaatgctgagagctgagtacggcgggagttttaggttctcttccgacgctatttccaccacctttaccactaatctgactcaatatagtctgtctcgagtggacctgggcgattgtattggtcgagacgcacgcgaagctattgaccgaatgtttgcccgcaaatacaacgctacccacataaaggtaggccagcctcagtattacctggctactggaggctttctgattgcttaccagcccttgcttagtaatacccttgccgagctctacgttagagagtatatgcgcgagcaggatcgcaaacctcggaacgctacacctgcaccccttcgcgaagctccctctgcaaacgcctccgtagaacggatcaagaccacctcctctatcgagtttgcccggctccagtttacctacaatcacatccagcgacacgtgaacgatatgctcggaaggatcgcagtcgcgtggtgtgaactgcagaaccacgagctgactctgtggaacgaagcccggaaactgaatcctaacgctatcgcttctgccaccgtagggcgaagggtttctgctaggatgctcggtgacgtgatggccgtctccacttgtgttcctgtagctcccgacaacgtgatcgtgcagaattctatgcgagtaagcagtaggccaggtacctgctattcccgacctctggttagcttccggtacgaggaccaggggcctctgatcgaaggacagctcggagagaacaatgaattgagactgaccagagacgcactggagccgtgtactgtcggccacaggcgatattttatctttggaggggggtacgtctatttcgaggagtatgcctactcccaccaattgagcagggctgacgttacaacagtttccacgtttgctgacttgaatatcacgatgctcgaagacgcagaggcagtgcctctcgaggtttacacacgacacgagattaaagatagcgggctgctggactatactgaagtgcagagacgcaaccagctccacgacttgaggtttgctgatattgacaccgtgatcagggctgacgccaacgctgctatgttcgctggcttgtgtgctttcttcgagggaatgggtgacctgggcagagccgtgggtaaggtcgtaatgggcgtcgtgggcggagtagtaagtgccgtctccggagtatcaagctttatgtcaaaccccttcggcgctctggcggttggtcttctcgttttggcaggtcttgtagccgccttcttcgctttccgctatgtgctgcagctccaacggaatcctatgaaagctctgtaccccctgacaactaaggagctgaaaacttccgatcctggtggtgtaggcggtgaaggtgaagaaggagcagagggggggggctttgatgaagccaagctcgccgaagcacgcgaaatgattagatatatggccctggtgtctgctatggagagaacagaacacaaagctagaaagaaaggcacctctgccctgctctcttctaaggtcacaaatatggtgctcaggaagcggaataaggctagatattctccactgcacaatgaagacgaggccggagacgaagacgagttggagggaagaggctccttgctgacctgcggtgacgtggaagagaatcccggccctatggcattgggtagagttggtttggctgtgggactttggggtctcctctgggtcggtgtggttgtcgtactggctaacgcttctccaggccgcactattactgttggaccgagagggaacgcttccaacgctgctccctctgcctcccctaggaacgcttctgctcctagaactacacctactccaccgcaaccccgcaaagcaaccaaaagcaaggcctcaaccgctaaaccagctcctccaccgaagacaggcccacctaaaaccagcagcgagcccgtgcggtgtaatcgacacgatcccctggcccgatacggtagtcgggtgcaaatccgctgtaggtttcctaatagtactagaacagaaagcaggctgcagatctggagatacgccactgccactgacgcagaaatcgggaccgccccttcccttgaggaggtgatggtgaacgtaagcgctccaccaggaggtcagctcgtctacgactcagcacccaataggaccgatccacacgtgatttgggcagaaggagctggaccaggcgcctctccaaggttgtattccgttgtaggcccactgggtcggcagagactgattatcgaagaactgactctggaaacccagggaatgtactattgggtttggggaaggactgataggcctagtgcttacggtacttgggtgagagtcagggtatttcggcctccttccctgactatacacccacacgcagtgctcgagggtcagcctttcaaggccacttgcacagccgcaacttactaccctgggaaccgagcagagtttgtgtggtttgaagacgggcggagagtttttgaccccgcacagatccacacgcagacccaggaaaaccctgacggattctccaccgttagcactgtgacctctgccgcagttggaggacaaggaccgccaaggaccttcacctgtcagctgacctggcaccgcgactctgtttcagcgtctagacggaacgcgagcggtactgcctctgtgctccccagacccacaatcacaatggagttcaccggcgatcacgccgtgtgtacggctggttgtgtacccgaaggcgtgacctttgcttggtttttgggagacgatagctcacctgccgagaaagtcgcagtggcttcacaaacttcctgcggaaggcccgggactgccactatccgatctacgctccccgtgtcttacgagcagacagaatatatttgccgactggcaggatatccagacggaatacccgtcctggaacaccacggttctcaccagcctccaccgagagatccaaccgagcgacaggtaatcagagccgtggaaggagcgggtattggcgtggcagttctcgttgctgtcgtacttgccggcacggctgttgtgtatctcactcacgccagcagcgtgcgatacaggcgcctcagatgagcgcgcagcgcttagacgtctcgcgatcgatgctagtgtgaaatagacatcagaattaagaaaaacgtagggtccaagtggttccccgttatggactcgctatctgtcaaccagatcttataccctgaagttcacctagatagcccgatagttaccaataagatagtagccatcctggagtatgctcgagtccctcacgcttacagcctggaggaccctacactgtgtcagaacatcaagcaccgcctaaaaaacggattttccaaccaaatgattataaacaatgtggaagttgggaatgtcatcaagtccaagcttaggagttatccggcccactctcatattccatatccaaattgtaatcaggatttatttaacatagaagacaaagagtcaacgaggaagatccgtgaactcctcaaaaaggggaattcgctgtactccaaagtcagtgataaggttttccaatgcttaagggacactaactcacggcttggcctaggctccgaattgagggaggacatcaaggagaaagttattaacttgggagtttacatgcacagctcccagtggtttgagccctttctgttttggtttacagtcaagactgagatgaggtcagtgattaaatcacaaacccatacttgccataggaggagacacacacctgtattcttcactggtagttcagttgagttgctaatctctcgtgaccttgttgctataatcagtaaagagtctcaacatgtatattacctgacatttgaactggttttgatgtattgtgatgtcatagaggggaggttaatgacagagaccgctatgactattgatgctaggtatacagagcttctaggaagagtcagatacatgtggaaactgatagatggtttcttccctgcactcgggaatccaacttatcaaattgtagccatgctggagcctctttcacttgcttacctgcagctgagggatataacagtagaactcagaggtgctttccttaaccactgctttactgaaatacatgatgttcttgaccaaaacgggttttctgatgaaggtacttatcatgagttaactgaagctctagattacattttcataactgatgacatacatctgacaggggagattttctcatttttcagaagtttcggccaccccagacttgaagcagtaacggctgctgaaaatgttaggaaatacatgaatcagcctaaagtcattgtgtatgagactctgatgaaaggtcatgccatattttgtggaatcataatcaacggctatcgtgacaggcacggaggcagttggccaccgctgaccctccccctgcatgctgcagacacaatccggaatgctcaagcttcaggtgaagggttaacacatgagcagtgcgttgataactggaaatcttttgctggagtgaaatttggctgctttatgcctcttagcctggatagtgatctgacaatgtacctaaaggacaaggcacttgctgctctccaaagggaatgggattcagtttacccgaaagagttcctgcgttacgaccctcccaagggaaccgggtcacggaggcttgtagatgttttccttaatgattcgagctttgacccatatgatgtgataatgtatgttgtaagtggagcttacctccatgaccctgagttcaacctgtcttacagcctgaaagaaaaggagatcaaggaaacaggtagactttttgctaaaatgacttacaaaatgagggcatgccaagtgattgctgaaaatctaatctcaaacgggattggcaaatattttaaggacaatgggatggccaaggatgagcacgatttgactaaggcactccacactctagctgtctcaggagtccccaaagatctcaaagaaagtcacaggggggggccagtcttaaaaacctactcccgaagcccagtccacacaagtaccaggaacgtgagagcagcaaaagggtttatagggttccctcaagtaattcggcaggaccaagacactgatcatccggagaatatggaagcttacgagacagtcagtgcatttatcacgactgatctcaagaagtactgccttaattggagatatgagaccatcagcttgtttgcacagaggctaaatgagatttacggattgccctcatttttccagtggctgcataagaggcttgagacctctgtcctgtatgtaagtgaccctcattgcccccccgaccttgacgcccatatcccgttatataaagtccccaatgatcaaatcttcattaagtaccctatgggaggtatagaagggtattgtcagaagctgtggaccatcagcaccattccctatctatacctggctgcttatgagagcggagtaaggattgcttcgttagtgcaaggggacaatcagaccatagccgtaacaaaaagggtacccagcacatggccctacaaccttaagaaacgggaagctgctagagtaactagagattactttgtaattcttaggcaaaggctacatgatattggccatcacctcaaggcaaatgagacaattgtttcatcacatttttttgtctattcaaaaggaatatattatgatgggctacttgtgtcccaatcactcaagagcatcgcaagatgtgtattctggtcagagactatagttgatgaaacaagggcagcatgcagtaatattgctacaacaatggctaaaagcatcgagagaggttatgaccgttaccttgcatattccctgaacgtcctaaaagtgatacagcaaattctgatctctcttggcttcacaatcaattcaaccatgacccgggatgtagtcatacccctcctcacaaacaacgacctcttaataaggatggcactgttgcccgctcctattggggggatgaattatctgaatatgagcaggctgtttgtcagaaacatcggtgatccagtaacatcatcaattgctgatctcaagagaatgattctcgcctcactaatgcctgaagagaccctccatcaagtaatgacacaacaaccgggggactcttcattcctagactgggctagcgacccttactcagcaaatcttgtatgtgtccagagcatcactagactcctcaagaacataactgcaaggtttgtcctgatccatagtccaaacccaatgttaaaaggattattccatgatgacagtaaagaagaggacgagggactggcggcattcctcatggacaggcatattatagtacctagggcagctcatgaaatcctggatcatagtgtcacaggggcaagagagtctattgcaggcatgctggataccacaaaaggcttgattcgagccagcatgaggaagggggggttaacctctcgagtgataaccagattgtccaattatgactatgaacaattcagagcagggatggtgctattgacaggaagaaagagaaatgtcctcattgacaaagagtcatgttcagtgcagctggcgagagctctaagaagccatatgtgggcgaggctagctcgaggacggcctatttacggccttgaggtccctgatgtactagaatctatgcgaggccaccttattcggcgtcatgagacatgtgtcatctgcgagtgtggatcagtcaactacggatggttttttgtcccctcgggttgccaactggatgatattgacaaggaaacatcatccttgagagtcccatatattggttctaccactgatgagagaacagacatgaagcttgccttcgtaagagccccaagtcgatccttgcgatctgctgttagaatagcaacagtgtactcatgggcttacggtgatgatgatagctcttggaacgaagcctggttgttggctaggcaaagggccaatgtgagcctggaggagctaagggtgatcactcccatctcaacttcgactaatttagcgcataggttgagggatcgtagcactcaagtgaaatactcaggtacatcccttgtccgagtggcgaggtataccacaatctccaacgacaatctctcatttgtcatatcagataagaaggttgatactaactttatataccaacaaggaatgcttctagggttgggtgttttagaaacattgtttcgactcgagaaagataccggatcatctaacacggtattacatcttcacgtcgaaacagattgttgcgtgatcccgatgatagatcatcccaggatacccagctcccgcaagctagagctgagggcagagctatgtaccaacccattgatatatgataatgcacctttaattgacagagatgcaacaaggctatacacccagagccataggaggcaccttgtggaatttgttacatggtccacaccccaactatatcacattttagctaagtccacagcactatctatgattgacctggtaacaaaatttgagaaggaccatatgaatgaaatttcagctctcataggggatgacgatatcaatagtttcataactgagtttctgctcatagagccaagattattcactatctacttgggccagtgtgcggccatcaattgggcatttgatgtacattatcatagaccatcagggaaatatcagatgggtgagctgttgtcatcgttcctttctagaatgagcaaaggagtgtttaaggtgcttgtcaatgctctaagccacccaaagatctacaagaaattctggcattgtggtattatagagcctatccatggtccttcacttgatgctcaaaacttgcacacaactgtgtgcaacatggtttacacatgctatatgacctacctcgacctgttgttgaatgaagagttagaagagttcacatttctcttgtgtgaaagcgacgaggatgtagtaccggacagattcgacaacatccaggcaaaacacttatgtgttctggcagatttgtactgtcaaccagggacctgcccaccaattcgaggtctaagaccggtagagaaatgtgcagttctaaccgaccatatcaaggcagaggctatgttatctccagcaggatcttcgtggaacataaatccaattattgtagaccattactcatgctctctgacttatctccggcgaggatcgatcaaacagataagattgagagttgatccaggattcattttcgacgccctcgctgaggtaaatgtcagtcagccaaagatcggcagcaacaacatctcaaatatgagcatcaaggctttcagacccccacacgatgatgttgcaaaattgctcaaagatatcaacacaagcaagcacaatcttcccatttcagggggcaatctcgccaattatgaaatccatgctttccgcagaatcgggttgaactcatctgcttgctacaaagctgttgagatatcaacattaattaggagatgccttgagccaggggaggacggcttgttcttgggtgagggatcgggttctatgttgatcacttataaagagatacttaaactaaacaagtgcttctataatagtggggtttccgccaattctagatctggtcaaagggaattagcaccctatccctccgaagttggccttgtcgaacacagaatgggagtaggtaatattgtcaaagtgctctttaacgggaggcccgaagtcacgtgggtaggcagtgtagattgcttcaatttcatagttagtaatatccctacctctagtgtggggtttatccattcagatatagagaccttgcctgacaaagatactatagagaagctagaggaattggcagccatcttatcgatggctctgctcctgggcaaaataggatcaatactggtgattaagcttatgcctttcagcggggattttgttcagggatttataagttatgtagggtctcattatagagaagtgaaccttgtataccctagatacagcaacttcatctctactgaatcttatttggttatgacagatctcaaggctaaccggctaatgaatcctgaaaagattaagcagcagataattgaatcatctgtgaggacttcacctggacttataggtcacatcctatccattaagcaactaagctgcatacaagcaattgtgggagacgcagttagtagaggtgatatcaatcctactctgaaaaaacttacacctatagagcaggtgctgatcaattgcgggttggcaattaacggacctaagctgtgcaaagaattgatccaccatgatgttgcctcagggcaagatggattgcttaattctatactcatcctctacagggagttggcaagattcaaagacaaccaaagaagtcaacaagggatgttccacgcttaccccgtattggtaagtagcaggcaacgagaacttatatctaggatcacccgcaaattctgggggcacattcttctttactccgggaacaaaaagttgataaataagtttatccagaatctcaagtccggctatctgatactagacttacaccagaatatcttcgttaagaatctatccaagtcagagaaacagattattatgacggggggtttgaaacgtgagtgggtttttaaggtaacagtcaaggagaccaaagaatggtataagttagtcggatacagtgccctgattaaggactaattggttgaactccggaaccctaatcctgccctaggtggttaggcattatttgcaatatattaaagaaaactttgaaaatacgaagtttctattcccagctttgtctggt

SEQ ID NO: 73 - DNA, 21540 bp, synthetic construct
  source 1..21540: mol_type = other DNA
accaaacaaagttgggtaaggatagttcaatcaatgatcatcttctagtgcacttaggattcaagatcctattatcagggacaagagcaggattagggatatccgagatggccacacttttaaggagcttagcattgttcaaaagaaacaaggacaaaccacccattacatcaggatccggtggagccatcagaggaatcaaacacattattatagtaccaatccctggagattcctcaattaccactcgatccagacttctggaccggttggtgaggttaattggaaacccggatgtgagcgggcccaaactaacaggggcactaataggtatattatccttatttgtggagtctccaggtcaattgattcagaggatcaccgatgaccctgacgttagcataaggctgttagaggttgtccagagtgaccagtcacaatctggccttaccttcgcatcaagaggtaccaacatggaggatgaggcggaccaatacttttcacatgatgatccaattagtagtgatcaatccaggttcggatggttcgggaacaaggaaatctcagatattgaagtgcaagaccctgagggattcaacatgattctgggtaccatcctagcccaaatttgggtcttgctcgcaaaggcggttacggccccagacacggcagctgattcggagctaagaaggtggataaagtacacccaacaaagaagggtagttggtgaatttagattggagagaaaatggttggatgtggtgaggaacaggattgccgaggacctctccttacgccgattcatggtcgctctaatcctggatatcaagagaacacccggaaacaaacccaggattgctgaaatgatatgtgacattgatacatatatcgtagaggcaggattagccagttttatcctgactattaagtttgggatagaaactatgtatcctgctcttggactgcatgaatttgctggtgagttatccacacttgagtccttgatgaacctttaccagcaaatgggggaaactgcaccctacatggtaatcctggagaactcaattcagaacaagttcagtgcaggatcataccctctgctctggagctatgccatgggagtaggagtggaacttgaaaactccatgggaggtttgaactttggccgatcttactttgatccagcatattttagattagggcaagagatggtaaggaggtcagctggaaaggtcagttccacattggcatctgaactcggtatcactgccgaggatgcaaggcttgtttcagagattgcaatgcatactactgaggacaagatcagtagagcggttggacccagacaagcccaagtatcatttctacacggtgatcaaagtgagaatgagctaccgagattggggggcaaggaagataggagggtcaaacagagtcgaggagaagccagggagagctacagagaaaccgggcccagcagagcaagtgatgcgagagctgcccatcttccaaccggcacacccctagacattgacactgcaacggagtccagccaagatccgcaggacagtcgaaggtcagctgacgccctgcttaggctgcaagccatggcaggaatctcggaagaacaaggctcagacacggacacccctatagtgtacaatgacagaaatcttctagactaggtgcgagaggccgagggccagaacaacatccgcctaccatccatcattgttataaaaaacttaggaaccaggtccacacagccgccagcccatcaaccatccactcccacgattggagccaatggcagaagagcaggcacgccatgtcaaaaacggactggaatgcatccgggctctcaaggccgagcccatcggctcactggccatcgaggaagctatggcagcatggtcagaaatatcagacaacccaggacaggagcgagccacctgcagggaagagaaggcaggcagttcgggtctcagcaaaccatgcctctcagcaattggatcaactgaaggcggtgcacctcgcatccgcggtcagggacctggagagagcgatgacgacgctgaaactttgggaatccccccaagaaatctccaggcatcaagcactgggttacagtgttattacgtttatgatcacagcggtgaagcggttaagggaatccaagatgctgactctatcatggttcaatcaggccttgatggtgatagcaccctctcaggaggagacaatgaatctgaaaacagcgatgtggatattggcgaacctgataccgagggatatgctatcactgaccggggatctgctcccatctctatggggttcagggcttctgatgttgaaactgcagaaggaggggagatccacgagctcctgagactccaatccagaggcaacaactttccgaagcttgggaaaactctcaatgttcctccgcccccggaccccggtagggccagcacttccgggacacccattaaaaagggcacagacgcgagattagcctcatttggaacggagatcgcgtctttattgacaggtggtgcaacccaatgtgctcgaaagtcaccctcggaaccatcagggccaggtgcacctgcggggaatgtccccgagtgtgtgagcaatgccgcactgatacaggagtggacacccgaatctggtaccacaatctccccgagatcccagaataatgaagaagggggagactattatgatgatgagctgttctctgatgtccaagatattaaaacagccttggccaaaatacacgaggataatcagaagataatctccaagctagaatcactgctgttattgaagggagaagttgagtcaattaagaagcagatcaacaggcaaaatatcagcatatccaccctggaaggacacctctcaagcatcatgatcgccattcctggacttgggaaggatcccaacgaccccactgcagatgtcgaaatcaatcccgacttgaaacccatcataggcagagattcaggccgagcactggccgaagttctcaagaaacccgttgccagccgacaactccaaggaatgacaaatggacggaccagttccagaggacagctgctgaaggaatttcagctaaagccgatcgggaaaaagatgagctcagccgtcgggtttgttcctgacaccggccctgcatcacgcagtgtaatccgctccattataaaatccagccggctagaggaggatcggaagcgttacctgatgactctccttgatgatatcaaaggagccaatgatcttgccaagttccaccagatgctgatgaagataataatgaagtagctacagctcaacttacctgccaaccccatgccagtcgacccaactagtacaacctaaatccattataaaaaacttaggagcaaagtgattgcctcccaaggtccacaatgacagagacctacgacttcgacaagtcggcatgggacatcaaagggtcgatcgctccgatacaacccaccacctacagtgatggcaggctggtgccccaggtcagagtcatagatcctggtctaggcgacaggaaggatgaatgctttatgtacatgtttctgctgggggttgttgaggacagcgattccctagggcctccaatcgggcgagcatttgggttcctgcccttaggtgttggcagatccacagcaaagcccgaaaaactcctcaaagaggccactgagcttgacatagttgttagacgtacagcagggctcaatgaaaaactggtgttctacaacaacaccccactaactctcctcacaccttggagaaaggtcctaacaacagggagtgtcttcaacgcaaaccaagtgtgcaatgcggttaatctgataccgctcgataccccgcagaggttccgtgttgtttatatgagcatcacccgtctttcggataacgggtattacaccgttcctagaagaatgctggaattcagatcggtcaatgcagtggccttcaacctgctggtgacccttaggattgacaaggcgataggccctgggaagatcatcgacaatacagagcaacttcctgaggcaacatttatggtccacatcgggaacttcaggagaaagaagagtgaagtctactctgccgattattgcaaaatgaaaatcgaaaagatgggcctggtttttgcacttggtgggatagggggcaccagtcttcacattagaagcacaggcaaaatgagcaagactctccatgcacaactcgggttcaagaagaccttatgttacccgctgatggatatcaatgaagaccttaatcgattactctggaggagcagatgcaagatagtaagaatccaggcagttttgcagccatcagttcctcaagaattccgcatttacgacgacgtgatcataaatgatgaccaaggactattcaaagttctgtagaccgtagtgcccagcaatgcccgaaaacgacccccctcacaatgacagccagaaggcccggacaaaaaagccccctccgaaagactccacggaccaagcgagaggccagccagcagccgacggcaagcgcgaacaccaggcggccccagcacagaacagccctgacacaaggccaccaccagccaccccaatctgcatcctcctcgtgggacccccgaggaccaacccccaaggctgcccccgatccaaaccaccaaccgcatccccaccacccccgggaaagaaacccccagcaattggaaggcccctccccctcttcctcaacacaagaactccacaaccgaaccgcacaagcgaccgaggtgacccaaccgcaggcatccgactccctagacagatcctctctccccggcaaactaaacaaaacttagggccaaggaacatacacacccaacagaacccagaccccggcccacggcgccgcgcccccaacccccgacaaccagagggagcccccaaccaatcccgccggctcccccggtgcccacaggcagggacaccaacccccgaacagacccagcacccaaccatcgacaatccaagacgggggggcccccccaaaaaaaggcccccaggggccgacagccagcaccgcgaggaagcccacccaccccacacacgaccacggcaaccaaaccagaacccagaccaccctgggccaccagctcccagactcggccatcaccccgcagaaaggaaaggccacaacccgcgcaccccagccccgatccggcggggagccacccaacccgaaccagcacccaagagcgatccccgaaggacccccgaaccgcaaaggacatcagtatcccacagcctctccaagtcccccggtctcctcctcttctcgaagggaccaaaagatcaatccaccacacccgacgacactcaactccccacccctaaaggagacaccgggaatcccagaatcaagactcatccaatgtccatcatgggtctcaaggtgaacgtctctgccatattcatggcagtactgttaactctccaaacacccaccggtcaaatccattggggcaatctctctaagataggggtggtaggaataggaagtgcaagctacaaagttatgactcgttccagccatcaatcattagtcataaaattaatgcccaatataactctcctcaataactgcacgagggtagagattgcagaatacaggagactactgagaacagttttggaaccaattagagatgcacttaatgcaatgacccagaatataagaccggttcagagtgtagcttcaagtaggagacacaagagatttgcgggagtagtcctggcaggtgcggccctaggcgttgccacagctgctcagataacagccggcattgcacttcaccagtccatgctgaactctcaagccatcgacaatctgagagcgagcctggaaactactaatcaggcaattgagacaatcagacaagcagggcaggagatgatattggctgttcagggtgtccaagactacatcaataatgagctgataccgtctatgaaccaactatcttgtgatttaatcggccagaagctcgggctcaaattgctcagatactatacagaaatcctgtcattatttggccccagtttacgggaccccatatctgcggagatatctatccaggctttgagctatgcgcttggaggagacatcaataaggtgttagaaaagctcggatacagtggaggtgatttactgggcatcttagagagcggaggaataaaggcccggataactcacgtcgacacagagtcctacttcattgtcctcagtatagcctatccgacgctgtccgagattaagggggtgattgtccaccggctagagggggtctcgtacaacataggctctcaagagtggtataccactgtgcccaagtatgttgcaacccaagggtaccttatctcgaattttgatgagtcatcgtgtactttcatgccagaggggactgtgtgcagccaaaatgccttgtacccgatgagtcctctgctccaagaatgcctccgggggtacaccaagtcctgtgctcgtacactcgtatccgggtcttttgggaaccggttcattttatcacaagggaacctaatagccaattgtgcatcaatcctttgcaagtgttacacaacaggaacgatcattaatcaagaccctgacaagatcctaacatacattgctgccgatcactgcccggtagtcgaggtgaacggcgtgaccatccaagtcgggagcaggaggtatccagacgctgtgtacttgcacagaattgacctcggtcctcccatatcattggagaggttggacgtagggacaaatctggggaatgcaattgctaagttggaggatgccaaggaattgttggagtcatcggaccagatattgaggagtatgaaaggtttatcgagcactagcatagtctacatcctgattgcagtgtgtcttggagggttgatagggatccccgctttaatatgttgctgcagggggcgttgtaacaaaaagggagaacaagttggtatgtcaagaccaggcctaaagcctgatcttacgggaacatcaaaatcctatgtaaggtcgctctgatcctctacaactcttgaaacacaaatgtcccacaagtctcctcttcgtcatcaagcaaccaccgcacccagcatcaagcccacctgaaattatctccggcttccctctggccgaacaatatcggtagttaatcaaaacttagggtgcaagatcatccacaatgtcaccacaacgagaccggataaatgccttctacaaagataacccccatcccaagggaagtaggatagtcattaacagagaacatcttatgattgatagaccttatgttttgctggctgttctgtttgtcatgtttctgagcttgatcgggttgctagccattgcaggcattagacttcatcgggcagccatctacaccgcagagatccataaaagcctcagcaccaatctagatgtaactaactcaatcgagcatcaggtcaaggacgtgctgacaccactcttcaaaatcatcggtgatgaagtgggcctgaggacacctcagagattcactgacctagtgaaattaatctctgacaagattaaattccttaatccggatagggagtacgacttcagagatctcacttggtgtatcaacccgccagagagaatcaaattggattatgatcaatactgtgcagatgtggctgctgaagagctcatgaatgcattggtgaactcaactctactggagaccagaacaaccaatcagttcctagctgtctcaaagggaaactgctcagggcccactacaatcagaggtcaattctcaaacatgtcgctgtccctgttagacttgtatttaggtcgaggttacaatgtgtcatctatagtcactatgacatcccagggaatgtatgggggaacttacctagtggaaaagcctaatctgagcagcaaaaggtcagagttgtcacaactgagcatgtaccgagtgtttgaagtaggtgttatcagaaatccgggtttgggggctccggtgttccatatgacaaactatcttgagcaaccagtcagtaatgatctcagcaactgtatggtggctttgggggagctcaaactcgcagccctttgtcacggggaagattctatcacaattccctatcagggatcagggaaaggtgtcagcttccagctcgtcaagctaggtgtctggaaatccccaaccgacatgcaatcctgggtccccttatcaacggatgatccagtgatagacaggctttacctctcatctcacagaggtgttatcgctgacaatcaagcaaaatgggctgtcccgacaacacgaacagatgacaagttgcgaatggagacatgcttccaacaggcgtgtaagggtaaaatccaagcactctgcgagaatcccgagtgggcaccattgaaggataacaggattccttcatacggggtcttgtctgttgatctgagtctgacagttgagcttaaaatcaaaattgcttcgggattcgggccattgatcacacacggttcagggatggacctatacaaatccaaccacaacaatgtgtattggctgactatcccgccaatgaagaacctagccttaggtgtaatcaacacattggagtggataccgagattcaaggttagtccctacctcttcactgtcccaattaaggaagcaggcgaagactgccatgccccaacatacctacctgcggaggtggatggtgatgtcaaactcagttccaatctggtgattctacctggtcaagatctccaatatgttttggcaacctacgatacttccagggttgaacatgctgtggtttattacgtttacagcccaagccgctcattttcttacttttatccttttaggttgcctataaagggggtccccatcgaattacaagtggaatgcttcacatgggaccaaaaactctggtgccgtcacttctgtgtgcttgcggactcagaatctggtggacatatcactcactctgggatggtgggcatgggagtcagctgcacagtcacccgggaagatggaaccaatcgcagatagggctgctagtgaaccaatcacatgatgtcacccagacatcaggcatacccactagtctaccctccatcattgttataaaaaacttaggaaccaggtccacacagccgccagcccatcaacgcgtacggccaccatgggtagacttacaagtggggtgggaactgccgcacttttggttgttgctgtgggcttgcgagtggtttgcgctaaatacgcactcgccgatccgtccctcaaaatggcagaccccaatcggtttcggggcaagaatttgccagtccttgaccagctgacagaccctccaggggttaagagagtgtatcacatccagccctcccttgaggaccccttccaacccccatctataccgatcaccgtgtattacgccgtgctcgaacgcgcttgcaggtctgtgttgctgcacgcaccatctgaggctccccagattgttagaggggcaagcgacgaagcgagaaagcacacttacaacctcaccatagcttggtaccgcatgggcgacaactgcgccatcccaatcactgttatggaatatactgagtgcccttacaataaatctctgggtgtgtgtcctattaggacacagcctcgctggagctactatgactccttctctgccgtgagtgaagataatttgggtttcctgatgcacgcacccgcctttgagacagcaggtacgtaccttaggcttgtaaaaatcaacgattggaccgagataacccagtttattctggagcacagggctagagcatcctgtaaatacgcgttgccactccggataccaccagccgcttgcttgacctccaaggcttatcaacagggcgtaacggtggattccatcggcatgctccctaggttcatccctgaaaatcaaagaacggtggcactgtattcactcaagattgccggctggcacggccctaagccaccatacacctctactctgctgcccccggagctgagtgataccactaacgcaacccagcctgaactggtgccagaggatcctgaagattctgcattgctggaagacccagccggcactgtgtctagtcaaattccccctaattggcacataccgagcattcaggacgttgctccacaccacgctccggctgctccaagcaatcctggcctgataataggtgcattggccggttctaccctcgccgtcctggtgattgggggtatcgccttctgggttaggaggagagctcaaatggcccccaagcgcttgaggttgccgcacataagagacgacgacgcccccccttctcaccagcctctgttttattagttcgaactacagctcaacttacctgccaaccccatgccagtcgacccaactagtacaacctaaatccattataaaaaacttaggaaccaggtccacacagccgccagcccatcaaccatccactcccacgattggaggccggccatgagaggcggaggccttgtttgtgctttggtggttggtgcacttgtggccgcagtagcttcagctgctccagccgcacctagagcttctggtggagttgctgctactgttgcagctaacggcggacctgcctcacaaccaccccctgttccctcccctgcaactaccaaagcccggaagaggaagactaaaaagccacctaagagaccagaggccacaccaccacctgacgctaacgcaaccgttgcagctgggcacgcgaccttgagggctcacctgcgagagataaaagtcgaaaacgccgacgctcagttctacgtctgccctccacctaccggagcaactgtagttcaatttgaacagccacggaggtgcccgacaagaccagaaggacagaattacaccgaaggaatagccgtggtctttaaagagaatatcgccccttacaagttcaaggctacaatgtactacaaggacgtgaccgtctcacaggtgtggtttgggcacagatattcacagtttatgggaatcttcgaagatagagccccggtgcccttcgaagaggtgatcgataagataaacgctaagggcgtgtgcagatccaccgccaagtatgtgcgaaacaatatggaaactaccgctttccaccgagacgatcacgagaccgatatggagctgaagcctgccaaagtagccacgcgaacctcccgcggctggcacactaccgatctgaagtataaccctagccgcgttgaagcgttccacaggtacggtaccacagtaaactgtatcgtggaggaagttgacgctcgcagcgtgtacccctacgacgaattcgtgctggccaccggcgatttcgtatatatgtcacctttctacggatatcgcgagggcagccacacggaacacacctcttacgctgccgatcggttcaagcaagtcgacggtttttacgctagagacctgaccaccaaggcacgggcaacctcccctacaactaggaaccttcttactaccccaaaatttaccgtagcttgggactgggtgcctaagaggccagcagtctgcactatgactaagtggcaagaagtggacgaaatgctgagagctgagtacggcgggagttttaggttctcttccgacgctatttccaccacctttaccactaatctgactcaatatagtctgtctcgagtggacctgggcgattgtattggtcgagacgcacgcgaagctattgaccgaatgtttgcccgcaaatacaacgctacccacataaaggtaggccagcctcagtattacctggctactggaggctttctgattgcttaccagcccttgcttagtaatacccttgccgagctctacgttagagagtatatgcgcgagcaggatcgcaaacctcggaacgctacacctgcaccccttcgcgaagctccctctgcaaacgcctccgtagaacggatcaagaccacctcctctatcgagtttgcccggctccagtttacctacaatcacatccagcgacacgtgaacgatatgctcggaaggatcgcagtcgcgtggtgtgaactgcagaaccacgagctgactctgtggaacgaagcccggaaactgaatcctaacgctatcgcttctgccaccgtagggcgaagggtttctgctaggatgctcggtgacgtgatggccgtctccacttgtgttcctgtagctcccgacaacgtgatcgtgcagaattctatgcgagtaagcagtaggccaggtacctgctattcccgacctctggttagcttccggtacgaggaccaggggcctctgatcgaaggacagctcggagagaacaatgaattgagactgaccagagacgcactggagccgtgtactgtcggccacaggcgatattttatctttggaggggggtacgtctatttcgaggagtatgcctactcccaccaattgagcagggctgacgttacaacagtttccacgtttgctgacttgaatatcacgatgctcgaagacgcagaggcagtgcctctcgaggtttacacacgacacgagattaaagatagcgggctgctggactatactgaagtgcagagacgcaaccagctccacgacttgaggtttgctgatattgacaccgtgatcagggctgacgccaacgctgctatgttcgctggcttgtgtgctttcttcgagggaatgggtgacctgggcagagccgtgggtaaggtcgtaatgggcgtcgtgggcggagtagtaagtgccgtctccggagtatcaagctttatgtcaaaccccttcggcgctctggcggttggtcttctcgttttggcaggtcttgtagccgccttcttcgctttccgctatgtgctgcagctccaacggaatcctatgaaagctctgtaccccctgacaactaaggagctgaaaacttccgatcctggtggtgtaggcggtgaaggtgaagaaggagcagagggggggggctttgatgaagccaagctcgccgaagcacgcgaaatgattagatatatggccctggtgtctgctatggagagaacagaacacaaagctagaaagaaaggcacctctgccctgctctcttctaaggtcacaaatatggtgctcaggaagcggaataaggctagatattctccactgcacaacgaagacgaggccggagacgaagacgagttggcgacgaacttctcactgcttaagcaagcaggagacgtggaggagaatccgggcccaatggcattgggtagagttggtttggctgtgggactttggggtctcctctgggtcggtgtggttgtcgtactggctaacgcttctccaggccgcactattactgttggaccgagagggaacgcttccaacgctgctccctctgcctcccctaggaacgcttctgctcctagaactacacctactccaccgcaaccccgcaaagcaaccaaaagcaaggcctcaaccgctaaaccagctcctccaccgaagacaggcccacctaaaaccagcagcgagcccgtgcggtgtaatcgacacgatcccctggcccgatacggtagtcgggtgcaaatccgctgtaggtttcctaatagtactagaacagaaagcaggctgcagatctggagatacgccactgccactgacgcagaaatcgggaccgccccttcccttgaggaggtgatggtgaacgtaagcgctccaccaggaggtcagctcgtctacgactcagcacccaataggaccgatccacacgtgatttgggcagaaggagctggaccaggcgcctctccaaggttgtattccgttgtaggcccactgggtcggcagagactgattatcgaagaactgactctggaaacccagggaatgtactattgggtttggggaaggactgataggcctagtgcttacggtacttgggtgagagtcagggtatttcggcctccttccctgactatacacccacacgcagtgctcgagggtcagcctttcaaggccacttgcacagccgcaacttactaccctgggaaccgagcagagtttgtgtggtttgaagacgggcggagagtttttgaccccgcacagatccacacgcagacccaggaaaaccctgacggattctccaccgttagcactgtgacctctgccgcagttggaggacaaggaccgccaaggaccttcacctgtcagctgacctggcaccgcgactctgtttcagcgtctagacggaacgcgagcggtactgcctctgtgctccccagacccacaatcacaatggagttcaccggcgatcacgccgtgtgtacggctggttgtgtacccgaaggcgtgacctttgcttggtttttgggagacgatagctcacctgccgagaaagtcgcagtggcttcacaaacttcctgcggaaggcccgggactgccactatccgatctacgctccccgtgtcttacgagcagacagaatatatttgccgactggcaggatatccagacggaatacccgtcctggaacaccacggttctcaccagcctccaccgagagatccaaccgagcgacaggtaatcagagccgtggaaggagcgggtattggcgtggcagttctcgttgctgtcgtacttgccggcacggctgttgtgtatctcactcacgccagcagcgtgcgatacaggcgcctcagatgataagcgcgcagcgcttagacgtctcgcgatcgatgctagtgtgaaatagacatcagaattaagaaaaacgtagggtccaagtggttccccgttatggactcgctatctgtcaaccagatcttataccctgaagttcacctagatagcccgatagttaccaataagatagtagccatcctggagtatgctcgagtccctcacgcttacagcctggaggaccctacactgtgtcagaacatcaagcaccgcctaaaaaacggattttccaaccaaatgattataaacaatgtggaagttgggaatgtcatcaagtccaagcttaggagttatccggcccactctcatattccatatccaaattgtaatcaggatttatttaacatagaagacaaagagtcaacgaggaagatccgtgaactcctcaaaaaggggaattcgctgtactccaaagtcagtgataaggttttccaatgcttaagggacactaactcacggcttggcctaggctccgaattgagggaggacatcaaggagaaagttattaacttgggagtttacatgcacagctcccagtggtttgagccctttctgttttggtttacagtcaagactgagatgaggtcagtgattaaatcacaaacccatacttgccataggaggagacacacacctgtattcttcactggtagttcagttgagttgctaatctctcgtgaccttgttgctataatcagtaaagagtctcaacatgtatattacctgacatttgaactggttttgatgtattgtgatgtcatagaggggaggttaatgacagagaccgctatgactattgatgctaggtatacagagcttctaggaagagtcagatacatgtggaaactgatagatggtttcttccctgcactcgggaatccaacttatcaaattgtagccatgctggagcctctttcacttgcttacctgcagctgagggatataacagtagaactcagaggtgctttccttaaccactgctttactgaaatacatgatgttcttgaccaaaacgggttttctgatgaaggtacttatcatgagttaactgaagctctagattacattttcataactgatgacatacatctgacaggggagattttctcatttttcagaagtttcggccaccccagacttgaagcagtaacggctgctgaaaatgttaggaaatacatgaatcagcctaaagtcattgtgtatgagactctgatgaaaggtcatgccatattttgtggaatcataatcaacggctatcgtgacaggcacggaggcagttggccaccgctgaccctccccctgcatgctgcagacacaatccggaatgctcaagcttcaggtgaagggttaacacatgagcagtgcgttgataactggaaatcttttgctggagtgaaatttggctgctttatgcctcttagcctggatagtgatctgacaatgtacctaaaggacaaggcacttgctgctctccaaagggaatgggattcagtttacccgaaagagttcctgcgttacgaccctcccaagggaaccgggtcacggaggcttgtagatgttttccttaatgattcgagctttgacccatatgatgtgataatgtatgttgtaagtggagcttacctccatgaccctgagttcaacctgtcttacagcctgaaagaaaaggagatcaaggaaacaggtagactttttgctaaaatgacttacaaaatgagggcatgccaagtgattgctgaaaatctaatctcaaacgggattggcaaatattttaaggacaatgggatggccaaggatgagcacgatttgactaaggcactccacactctagctgtctcaggagtccccaaagatctcaaagaaagtcacaggggggggccagtcttaaaaacctactcccgaagcccagtccacacaagtaccaggaacgtgagagcagcaaaagggtttatagggttccctcaagtaattcggcaggaccaagacactgatcatccggagaatatggaagcttacgagacagtcagtgcatttatcacgactgatctcaagaagtactgccttaattggagatatgagaccatcagcttgtttgcacagaggctaaatgagatttacggattgccctcatttttccagtggctgcataagaggcttgagacctctgtcctgtatgtaagtgaccctcattgcccccccgaccttgacgcccatatcccgttatataaagtccccaatgatcaaatcttcattaagtaccctatgggaggtatagaagggtattgtcagaagctgtggaccatcagcaccattccctatctatacctggctgcttatgagagcggagtaaggattgcttcgttagtgcaaggggacaatcagaccatagccgtaacaaaaagggtacccagcacatggccctacaaccttaagaaacgggaagctgctagagtaactagagattactttgtaattcttaggcaaaggctacatgatattggccatcacctcaaggcaaatgagacaattgtttcatcacatttttttgtctattcaaaaggaatatattatgatgggctacttgtgtcccaatcactcaagagcatcgcaagatgtgtattctggtcagagactatagttgatgaaacaagggcagcatgcagtaatattgctacaacaatggctaaaagcatcgagagaggttatgaccgttaccttgcatattccctgaacgtcctaaaagtgatacagcaaattctgatctctcttggcttcacaatcaattcaaccatgacccgggatgtagtcatacccctcctcacaaacaacgacctcttaataaggatggcactgttgcccgctcctattggggggatgaattatctgaatatgagcaggctgtttgtcagaaacatcggtgatccagtaacatcatcaattgctgatctcaagagaatgattctcgcctcactaatgcctgaagagaccctccatcaagtaatgacacaacaaccgggggactcttcattcctagactgggctagcgacccttactcagcaaatcttgtatgtgtccagagcatcactagactcctcaagaacataactgcaaggtttgtcctgatccatagtccaaacccaatgttaaaaggattattccatgatgacagtaaagaagaggacgagggactggcggcattcctcatggacaggcatattatagtacctagggcagctcatgaaatcctggatcatagtgtcacaggggcaagagagtctattgcaggcatgctggataccacaaaaggcttgattcgagccagcatgaggaagggggggttaacctctcgagtgataaccagattgtccaattatgactatgaacaattcagagcagggatggtgctattgacaggaagaaagagaaatgtcctcattgacaaagagtcatgttcagtgcagctggcgagagctctaagaagccatatgtgggcgaggctagctcgaggacggcctatttacggccttgaggtccctgatgtactagaatctatgcgaggccaccttattcggcgtcatgagacatgtgtcatctgcgagtgtggatcagtcaactacggatggttttttgtcccctcgggttgccaactggatgatattgacaaggaaacatcatccttgagagtcccatatattggttctaccactgatgagagaacagacatgaagcttgccttcgtaagagccccaagtcgatccttgcgatctgctgttagaatagcaacagtgtactcatgggcttacggtgatgatgatagctcttggaacgaagcctggttgttggctaggcaaagggccaatgtgagcctggaggagctaagggtgatcactcccatctcaacttcgactaatttagcgcataggttgagggatcgtagcactcaagtgaaatactcaggtacatcccttgtccgagtggcgaggtataccacaatctccaacgacaatctctcatttgtcatatcagataagaaggttgatactaactttatataccaacaaggaatgcttctagggttgggtgttttagaaacattgtttcgactcgagaaagataccggatcatctaacacggtattacatcttcacgtcgaaacagattgttgcgtgatcccgatgatagatcatcccaggatacccagctcccgcaagctagagctgagggcagagctatgtaccaacccattgatatatgataatgcacctttaattgacagagatgcaacaaggctatacacccagagccataggaggcaccttgtggaatttgttacatggtccacaccccaactatatcacattttagctaagtccacagcactatctatgattgacctggtaacaaaatttgagaaggaccatatgaatgaaatttcagctctcataggggatgacgatatcaatagtttcataactgagtttctgctcatagagccaagattattcactatctacttgggccagtgtgcggccatcaattgggcatttgatgtacattatcatagaccatcagggaaatatcagatgggtgagctgttgtcatcgttcctttctagaatgagcaaaggagtgtttaaggtgcttgtcaatgctctaagccacccaaagatctacaagaaattctggcattgtggtattatagagcctatccatggtccttcacttgatgctcaaaacttgcacacaactgtgtgcaacatggtttacacatgctatatgacctacctcgacctgttgttgaatgaagagttagaagagttcacatttctcttgtgtgaaagcgacgaggatgtagtaccggacagattcgacaacatccaggcaaaacacttatgtgttctggcagatttgtactgtcaaccagggacctgcccaccaattcgaggtctaagaccggtagagaaatgtgcagttctaaccgaccatatcaaggcagaggctatgttatctccagcaggatcttcgtggaacataaatccaattattgtagaccattactcatgctctctgacttatctccggcgaggatcgatcaaacagataagattgagagttgatccaggattcattttcgacgccctcgctgaggtaaatgtcagtcagccaaagatcggcagcaacaacatctcaaatatgagcatcaaggctttcagacccccacacgatgatgttgcaaaattgctcaaagatatcaacacaagcaagcacaatcttcccatttcagggggcaatctcgccaattatgaaatccatgctttccgcagaatcgggttgaactcatctgcttgctacaaagctgttgagatatcaacattaattaggagatgccttgagccaggggaggacggcttgttcttgggtgagggatcgggttctatgttgatcacttataaagagatacttaaactaaacaagtgcttctataatagtggggtttccgccaattctagatctggtcaaagggaattagcaccctatccctccgaagttggccttgtcgaacacagaatgggagtaggtaatattgtcaaagtgctctttaacgggaggcccgaagtcacgtgggtaggcagtgtagattgcttcaatttcatagttagtaatatccctacctctagtgtggggtttatccattcagatatagagaccttgcctgacaaagatactatagagaagctagaggaattggcagccatcttatcgatggctctgctcctgggcaaaataggatcaatactggtgattaagcttatgcctttcagcggggattttgttcagggatttataagttatgtagggtctcattatagagaagtgaaccttgtataccctagatacagcaacttcatctctactgaatcttatttggttatgacagatctcaaggctaaccggctaatgaatcctgaaaagattaagcagcagataattgaatcatctgtgaggacttcacctggacttataggtcacatcctatccattaagcaactaagctgcatacaagcaattgtgggagacgcagttagtagaggtgatatcaatcctactctgaaaaaacttacacctatagagcaggtgctgatcaattgcgggttggcaattaacggacctaagctgtgcaaagaattgatccaccatgatgttgcctcagggcaagatggattgcttaattctatactcatcctctacagggagttggcaagattcaaagacaaccaaagaagtcaacaagggatgttccacgcttaccccgtattggtaagtagcaggcaacgagaacttatatctaggatcacccgcaaattctgggggcacattcttctttactccgggaacaaaaagttgataaataagtttatccagaatctcaagtccggctatctgatactagacttacaccagaatatcttcgttaagaatctatccaagtcagagaaacagattattatgacggggggtttgaaacgtgagtgggtttttaaggtaacagtcaaggagaccaaagaatggtataagttagtcggatacagtgccctgattaaggactaattggttgaactccggaaccctaatcctgccctaggtggttaggcattatttgcaatatattaaagaaaactttgaaaatacgaagtttctattcccagctttgtctggt

SEQ ID NO: 74 - DNA, 21540 bp, synthetic construct
  source 1..21540: mol_type = other DNA
accaaacaaagttgggtaaggatagttcaatcaatgatcatcttctagtgcacttaggattcaagatcctattatcagggacaagagcaggattagggatatccgagatggccacacttttaaggagcttagcattgttcaaaagaaacaaggacaaaccacccattacatcaggatccggtggagccatcagaggaatcaaacacattattatagtaccaatccctggagattcctcaattaccactcgatccagacttctggaccggttggtgaggttaattggaaacccggatgtgagcgggcccaaactaacaggggcactaataggtatattatccttatttgtggagtctccaggtcaattgattcagaggatcaccgatgaccctgacgttagcataaggctgttagaggttgtccagagtgaccagtcacaatctggccttaccttcgcatcaagaggtaccaacatggaggatgaggcggaccaatacttttcacatgatgatccaattagtagtgatcaatccaggttcggatggttcgggaacaaggaaatctcagatattgaagtgcaagaccctgagggattcaacatgattctgggtaccatcctagcccaaatttgggtcttgctcgcaaaggcggttacggccccagacacggcagctgattcggagctaagaaggtggataaagtacacccaacaaagaagggtagttggtgaatttagattggagagaaaatggttggatgtggtgaggaacaggattgccgaggacctctccttacgccgattcatggtcgctctaatcctggatatcaagagaacacccggaaacaaacccaggattgctgaaatgatatgtgacattgatacatatatcgtagaggcaggattagccagttttatcctgactattaagtttgggatagaaactatgtatcctgctcttggactgcatgaatttgctggtgagttatccacacttgagtccttgatgaacctttaccagcaaatgggggaaactgcaccctacatggtaatcctggagaactcaattcagaacaagttcagtgcaggatcataccctctgctctggagctatgccatgggagtaggagtggaacttgaaaactccatgggaggtttgaactttggccgatcttactttgatccagcatattttagattagggcaagagatggtaaggaggtcagctggaaaggtcagttccacattggcatctgaactcggtatcactgccgaggatgcaaggcttgtttcagagattgcaatgcatactactgaggacaagatcagtagagcggttggacccagacaagcccaagtatcatttctacacggtgatcaaagtgagaatgagctaccgagattggggggcaaggaagataggagggtcaaacagagtcgaggagaagccagggagagctacagagaaaccgggcccagcagagcaagtgatgcgagagctgcccatcttccaaccggcacacccctagacattgacactgcaacggagtccagccaagatccgcaggacagtcgaaggtcagctgacgccctgcttaggctgcaagccatggcaggaatctcggaagaacaaggctcagacacggacacccctatagtgtacaatgacagaaatcttctagactaggtgcgagaggccgagggccagaacaacatccgcctaccatccatcattgttataaaaaacttaggaaccaggtccacacagccgccagcccatcaaccatccactcccacgattggagccaatggcagaagagcaggcacgccatgtcaaaaacggactggaatgcatccgggctctcaaggccgagcccatcggctcactggccatcgaggaagctatggcagcatggtcagaaatatcagacaacccaggacaggagcgagccacctgcagggaagagaaggcaggcagttcgggtctcagcaaaccatgcctctcagcaattggatcaactgaaggcggtgcacctcgcatccgcggtcagggacctggagagagcgatgacgacgctgaaactttgggaatccccccaagaaatctccaggcatcaagcactgggttacagtgttattacgtttatgatcacagcggtgaagcggttaagggaatccaagatgctgactctatcatggttcaatcaggccttgatggtgatagcaccctctcaggaggagacaatgaatctgaaaacagcgatgtggatattggcgaacctgataccgagggatatgctatcactgaccggggatctgctcccatctctatggggttcagggcttctgatgttgaaactgcagaaggaggggagatccacgagctcctgagactccaatccagaggcaacaactttccgaagcttgggaaaactctcaatgttcctccgcccccggaccccggtagggccagcacttccgggacacccattaaaaagggcacagacgcgagattagcctcatttggaacggagatcgcgtctttattgacaggtggtgcaacccaatgtgctcgaaagtcaccctcggaaccatcagggccaggtgcacctgcggggaatgtccccgagtgtgtgagcaatgccgcactgatacaggagtggacacccgaatctggtaccacaatctccccgagatcccagaataatgaagaagggggagactattatgatgatgagctgttctctgatgtccaagatattaaaacagccttggccaaaatacacgaggataatcagaagataatctccaagctagaatcactgctgttattgaagggagaagttgagtcaattaagaagcagatcaacaggcaaaatatcagcatatccaccctggaaggacacctctcaagcatcatgatcgccattcctggacttgggaaggatcccaacgaccccactgcagatgtcgaaatcaatcccgacttgaaacccatcataggcagagattcaggccgagcactggccgaagttctcaagaaacccgttgccagccgacaactccaaggaatgacaaatggacggaccagttccagaggacagctgctgaaggaatttcagctaaagccgatcgggaaaaagatgagctcagccgtcgggtttgttcctgacaccggccctgcatcacgcagtgtaatccgctccattataaaatccagccggctagaggaggatcggaagcgttacctgatgactctccttgatgatatcaaaggagccaatgatcttgccaagttccaccagatgctgatgaagataataatgaagtagctacagctcaacttacctgccaaccccatgccagtcgacccaactagtacaacctaaatccattataaaaaacttaggagcaaagtgattgcctcccaaggtccacaatgacagagacctacgacttcgacaagtcggcatgggacatcaaagggtcgatcgctccgatacaacccaccacctacagtgatggcaggctggtgccccaggtcagagtcatagatcctggtctaggcgacaggaaggatgaatgctttatgtacatgtttctgctgggggttgttgaggacagcgattccctagggcctccaatcgggcgagcatttgggttcctgcccttaggtgttggcagatccacagcaaagcccgaaaaactcctcaaagaggccactgagcttgacatagttgttagacgtacagcagggctcaatgaaaaactggtgttctacaacaacaccccactaactctcctcacaccttggagaaaggtcctaacaacagggagtgtcttcaacgcaaaccaagtgtgcaatgcggttaatctgataccgctcgataccccgcagaggttccgtgttgtttatatgagcatcacccgtctttcggataacgggtattacaccgttcctagaagaatgctggaattcagatcggtcaatgcagtggccttcaacctgctggtgacccttaggattgacaaggcgataggccctgggaagatcatcgacaatacagagcaacttcctgaggcaacatttatggtccacatcgggaacttcaggagaaagaagagtgaagtctactctgccgattattgcaaaatgaaaatcgaaaagatgggcctggtttttgcacttggtgggatagggggcaccagtcttcacattagaagcacaggcaaaatgagcaagactctccatgcacaactcgggttcaagaagaccttatgttacccgctgatggatatcaatgaagaccttaatcgattactctggaggagcagatgcaagatagtaagaatccaggcagttttgcagccatcagttcctcaagaattccgcatttacgacgacgtgatcataaatgatgaccaaggactattcaaagttctgtagaccgtagtgcccagcaatgcccgaaaacgacccccctcacaatgacagccagaaggcccggacaaaaaagccccctccgaaagactccacggaccaagcgagaggccagccagcagccgacggcaagcgcgaacaccaggcggccccagcacagaacagccctgacacaaggccaccaccagccaccccaatctgcatcctcctcgtgggacccccgaggaccaacccccaaggctgcccccgatccaaaccaccaaccgcatccccaccacccccgggaaagaaacccccagcaattggaaggcccctccccctcttcctcaacacaagaactccacaaccgaaccgcacaagcgaccgaggtgacccaaccgcaggcatccgactccctagacagatcctctctccccggcaaactaaacaaaacttagggccaaggaacatacacacccaacagaacccagaccccggcccacggcgccgcgcccccaacccccgacaaccagagggagcccccaaccaatcccgccggctcccccggtgcccacaggcagggacaccaacccccgaacagacccagcacccaaccatcgacaatccaagacgggggggcccccccaaaaaaaggcccccaggggccgacagccagcaccgcgaggaagcccacccaccccacacacgaccacggcaaccaaaccagaacccagaccaccctgggccaccagctcccagactcggccatcaccccgcagaaaggaaaggccacaacccgcgcaccccagccccgatccggcggggagccacccaacccgaaccagcacccaagagcgatccccgaaggacccccgaaccgcaaaggacatcagtatcccacagcctctccaagtcccccggtctcctcctcttctcgaagggaccaaaagatcaatccaccacacccgacgacactcaactccccacccctaaaggagacaccgggaatcccagaatcaagactcatccaatgtccatcatgggtctcaaggtgaacgtctctgccatattcatggcagtactgttaactctccaaacacccaccggtcaaatccattggggcaatctctctaagataggggtggtaggaataggaagtgcaagctacaaagttatgactcgttccagccatcaatcattagtcataaaattaatgcccaatataactctcctcaataactgcacgagggtagagattgcagaatacaggagactactgagaacagttttggaaccaattagagatgcacttaatgcaatgacccagaatataagaccggttcagagtgtagcttcaagtaggagacacaagagatttgcgggagtagtcctggcaggtgcggccctaggcgttgccacagctgctcagataacagccggcattgcacttcaccagtccatgctgaactctcaagccatcgacaatctgagagcgagcctggaaactactaatcaggcaattgagacaatcagacaagcagggcaggagatgatattggctgttcagggtgtccaagactacatcaataatgagctgataccgtctatgaaccaactatcttgtgatttaatcggccagaagctcgggctcaaattgctcagatactatacagaaatcctgtcattatttggccccagtttacgggaccccatatctgcggagatatctatccaggctttgagctatgcgcttggaggagacatcaataaggtgttagaaaagctcggatacagtggaggtgatttactgggcatcttagagagcggaggaataaaggcccggataactcacgtcgacacagagtcctacttcattgtcctcagtatagcctatccgacgctgtccgagattaagggggtgattgtccaccggctagagggggtctcgtacaacataggctctcaagagtggtataccactgtgcccaagtatgttgcaacccaagggtaccttatctcgaattttgatgagtcatcgtgtactttcatgccagaggggactgtgtgcagccaaaatgccttgtacccgatgagtcctctgctccaagaatgcctccgggggtacaccaagtcctgtgctcgtacactcgtatccgggtcttttgggaaccggttcattttatcacaagggaacctaatagccaattgtgcatcaatcctttgcaagtgttacacaacaggaacgatcattaatcaagaccctgacaagatcctaacatacattgctgccgatcactgcccggtagtcgaggtgaacggcgtgaccatccaagtcgggagcaggaggtatccagacgctgtgtacttgcacagaattgacctcggtcctcccatatcattggagaggttggacgtagggacaaatctggggaatgcaattgctaagttggaggatgccaaggaattgttggagtcatcggaccagatattgaggagtatgaaaggtttatcgagcactagcatagtctacatcctgattgcagtgtgtcttggagggttgatagggatccccgctttaatatgttgctgcagggggcgttgtaacaaaaagggagaacaagttggtatgtcaagaccaggcctaaagcctgatcttacgggaacatcaaaatcctatgtaaggtcgctctgatcctctacaactcttgaaacacaaatgtcccacaagtctcctcttcgtcatcaagcaaccaccgcacccagcatcaagcccacctgaaattatctccggcttccctctggccgaacaatatcggtagttaatcaaaacttagggtgcaagatcatccacaatgtcaccacaacgagaccggataaatgccttctacaaagataacccccatcccaagggaagtaggatagtcattaacagagaacatcttatgattgatagaccttatgttttgctggctgttctgtttgtcatgtttctgagcttgatcgggttgctagccattgcaggcattagacttcatcgggcagccatctacaccgcagagatccataaaagcctcagcaccaatctagatgtaactaactcaatcgagcatcaggtcaaggacgtgctgacaccactcttcaaaatcatcggtgatgaagtgggcctgaggacacctcagagattcactgacctagtgaaattaatctctgacaagattaaattccttaatccggatagggagtacgacttcagagatctcacttggtgtatcaacccgccagagagaatcaaattggattatgatcaatactgtgcagatgtggctgctgaagagctcatgaatgcattggtgaactcaactctactggagaccagaacaaccaatcagttcctagctgtctcaaagggaaactgctcagggcccactacaatcagaggtcaattctcaaacatgtcgctgtccctgttagacttgtatttaggtcgaggttacaatgtgtcatctatagtcactatgacatcccagggaatgtatgggggaacttacctagtggaaaagcctaatctgagcagcaaaaggtcagagttgtcacaactgagcatgtaccgagtgtttgaagtaggtgttatcagaaatccgggtttgggggctccggtgttccatatgacaaactatcttgagcaaccagtcagtaatgatctcagcaactgtatggtggctttgggggagctcaaactcgcagccctttgtcacggggaagattctatcacaattccctatcagggatcagggaaaggtgtcagcttccagctcgtcaagctaggtgtctggaaatccccaaccgacatgcaatcctgggtccccttatcaacggatgatccagtgatagacaggctttacctctcatctcacagaggtgttatcgctgacaatcaagcaaaatgggctgtcccgacaacacgaacagatgacaagttgcgaatggagacatgcttccaacaggcgtgtaagggtaaaatccaagcactctgcgagaatcccgagtgggcaccattgaaggataacaggattccttcatacggggtcttgtctgttgatctgagtctgacagttgagcttaaaatcaaaattgcttcgggattcgggccattgatcacacacggttcagggatggacctatacaaatccaaccacaacaatgtgtattggctgactatcccgccaatgaagaacctagccttaggtgtaatcaacacattggagtggataccgagattcaaggttagtccctacctcttcactgtcccaattaaggaagcaggcgaagactgccatgccccaacatacctacctgcggaggtggatggtgatgtcaaactcagttccaatctggtgattctacctggtcaagatctccaatatgttttggcaacctacgatacttccagggttgaacatgctgtggtttattacgtttacagcccaagccgctcattttcttacttttatccttttaggttgcctataaagggggtccccatcgaattacaagtggaatgcttcacatgggaccaaaaactctggtgccgtcacttctgtgtgcttgcggactcagaatctggtggacatatcactcactctgggatggtgggcatgggagtcagctgcacagtcacccgggaagatggaaccaatcgcagatagggctgctagtgaaccaatcacatgatgtcacccagacatcaggcatacccactagtctaccctccatcattgttataaaaaacttaggaaccaggtccacacagccgccagcccatcaacgcgtacggccaccatgggtagacttacaagtggggtgggaactgccgcacttttggttgttgctgtgggcttgcgagtggtttgcgctaaatacgcactcgccgatccgtccctcaaaatggcagaccccaatcggtttcggggcaagaatttgccagtccttgaccagctgacagaccctccaggggttaagagagtgtatcacatccagccctcccttgaggaccccttccaacccccatctataccgatcaccgtgtattacgccgtgctcgaacgcgcttgcaggtctgtgttgctgcacgcaccatctgaggctccccagattgttagaggggcaagcgacgaagcgagaaagcacacttacaacctcaccatagcttggtaccgcatgggcgacaactgcgccatcccaatcactgttatggaatatactgagtgcccttacaataaatctctgggtgtgtgtcctattaggacacagcctcgctggagctactatgactccttctctgccgtgagtgaagataatttgggtttcctgatgcacgcacccgcctttgagacagcaggtacgtaccttaggcttgtaaaaatcaacgattggaccgagataacccagtttattctggagcacagggctagagcatcctgtaaatacgcgttgccactccggataccaccagccgcttgcttgacctccaaggcttatcaacagggcgtaacggtggattccatcggcatgctccctaggttcatccctgaaaatcaaagaacggtggcactgtattcactcaagattgccggctggcacggccctaagccaccatacacctctactctgctgcccccggagctgagtgataccactaacgcaacccagcctgaactggtgccagaggatcctgaagattctgcattgctggaagacccagccggcactgtgtctagtcaaattccccctaattggcacataccgagcattcaggacgttgctccacaccacgctccggctgctccaagcaatcctggcctgataataggtgcattggccggttctaccctcgccgtcctggtgattgggggtatcgccttctgggttaggaggagagctcaaatggcccccaagcgcttgaggttgccgcacataagagacgacgacgcccccccttctcaccagcctctgttttattagttcgaactacagctcaacttacctgccaaccccatgccagtcgacccaactagtacaacctaaatccattataaaaaacttaggaaccaggtccacacagccgccagcccatcaaccatccactcccacgattggaggccggccatgaggggaggaggccttgtctgtgcacttgttgtaggagctttggtcgccgccgtagctagtgcagctccagcagcaccaagggcttcaggaggggttgcagctactgttgctgctaacggaggacctgctagccaaccacctccggtgccttctccggctactaccaaagcccgcaagcgaaaaacaaagaagcccccaaagaggccagaggccacacctccacccgacgctaacgctactgtggcggctggacacgctactttgagagcccacctgcgggaaatcaaggttgagaacgcagacgcacaattctacgtttgtcccccccctacaggtgcaacagtcgtgcagtttgagcagccaagacgctgtcctactaggcctgagggacaaaattacaccgagggtatcgccgtagtttttaaggagaatatcgcaccctataagtttaaagcgacaatgtactataaggatgtgaccgtcagccaagtctggtttggtcaccgatacagtcagtttatgggaatctttgaggaccgggccccggtccctttcgaagaagtgatcgacaagattaacgccaagggagtgtgcaggtcaaccgcaaagtacgtccgaaacaatatggaaacaaccgccttccacagggacgaccacgaaacagatatggagcttaagccggctaaagtggccactcgcacgtcaagaggttggcataccacggacctgaaatataacccttctagagttgaagctttccaccggtatgggaccacggtgaactgtattgtggaagaagtggacgccagatccgtgtacccctacgacgaattcgttcttgctacaggcgatttcgtgtatatgtctcctttctacggctacagggagggctcccacaccgagcacacctcctacgccgcagatagatttaaacaggtggacggcttctacgctcgcgatctgactactaaggcacgggcaacaagcccaacaactcgcaatttgctgaccacaccaaagtttactgtggcctgggactgggtacccaagaggcctgctgtttgcacaatgaccaaatggcaggaggttgacgagatgctccgggccgaatatggaggatcctttagattctcttctgacgctatcagtaccaccttcaccacaaatctgactcagtactctctgtctcgcgtagatctgggagactgtatcggtagggacgcacgcgaggctatagatcggatgttcgcccggaaatacaacgccacccacattaaagtggggcagccccagtattacttggctactgggggcttccttatcgcttatcagcctctgctctcaaataccctggcggagctttatgtacgcgagtatatgagggagcaggacaggaagccacgcaacgctaccccagcacccctgagagaagcgccttctgccaacgcgagtgtggaacgaattaagaccacgtcttcaatcgaattcgctcggctccaatttacctacaaccacattcaacgccacgttaacgatatgctgggaaggattgcagttgcttggtgtgagctccagaaccacgaactgacactgtggaacgaggccagaaagcttaacccaaacgctattgcttccgcgacagttggaagaagagtgtctgcacgaatgctcggcgacgttatggctgttagtacctgtgtgcctgtggcccctgacaatgtaattgttcagaacagtatgagagtctcttctagacccggcacttgctactccaggccactggtctcttttcgctacgaggatcaggggcctttgatcgagggccagttgggagagaataacgaactgcgcctgaccagagacgctctggaaccctgtacagtcggccacagacgatattttatattcggcggcggttacgtatattttgaagagtatgcgtactcccaccaactgtccagagcagatgtgaccactgtgagcacttttatcgatctcaatatcactatgctggaggatcacgagtttgttccgttggaagtgtacactcggcacgagatcaaggacagtggcctgctcgattataccgaagtccagaggcgcaatcaactgcacgatctgagatttgccgatattgacacagtgattagggctgacgctaacgccgctatgtttgctggcctgtgtgcctttttcgagggaatgggtgatctcggaagagccgtaggcaaggtggttatgggagtcgtaggtggcgtcgttagtgccgtgtcaggggtgtctagctttatgtctaaccccttcggagctttggctgtgggtctcctggtacttgccggactggtggccgcattttttgcctttaggtacgtcctgcagctgcagaggaatccaatgaaggccctgtatccacttacaacaaaggaacttaaaacctccgatcctggaggagttggaggagaaggcgaagagggagcggaaggtggtgggtttgacgaggccaagttggctgaggcccgagagatgataaggtatatggctctcgtatctgcaatggagagaactgagcacaaagctcgcaagaagggaaccagtgccctgctgagcagcaaagtgacaaatatggtgcttcgaaaacgcaataaggctcgctactctcctctgcacaacgaggacgaagcaggggatgaggacgaactcgcgacgaacttctcactgcttaagcaagcaggagacgtggaggagaatccgggcccaatggcattgggtagagttggtttggctgtgggactttggggtctcctctgggtcggtgtggttgtcgtactggctaacgcttctccaggccgcactattactgttggaccgagagggaacgcttccaacgctgctccctctgcctcccctaggaacgcttctgctcctagaactacacctactccaccgcaaccccgcaaagcaaccaaaagcaaggcctcaaccgctaaaccagctcctccaccgaagacaggcccacctaaaaccagcagcgagcccgtgcggtgtaatcgacacgatcccctggcccgatacggtagtcgggtgcaaatccgctgtaggtttcctaatagtactagaacagaaagcaggctgcagatctggagatacgccactgccactgacgcagaaatcgggaccgccccttcccttgaggaggtgatggtgaacgtaagcgctccaccaggaggtcagctcgtctacgactcagcacccaataggaccgatccacacgtgatttgggcagaaggagctggaccaggcgcctctccaaggttgtattccgttgtaggcccactgggtcggcagagactgattatcgaagaactgactctggaaacccagggaatgtactattgggtttggggaaggactgataggcctagtgcttacggtacttgggtgagagtcagggtatttcggcctccttccctgactatacacccacacgcagtgctcgagggtcagcctttcaaggccacttgcacagccgcaacttactaccctgggaaccgagcagagtttgtgtggtttgaagacgggcggagagtttttgaccccgcacagatccacacgcagacccaggaaaaccctgacggattctccaccgttagcactgtgacctctgccgcagttggaggacaaggaccgccaaggaccttcacctgtcagctgacctggcaccgcgactctgtttcagcgtctagacggaacgcgagcggtactgcctctgtgctccccagacccacaatcacaatggagttcaccggcgatcacgccgtgtgtacggctggttgtgtacccgaaggcgtgacctttgcttggtttttgggagacgatagctcacctgccgagaaagtcgcagtggcttcacaaacttcctgcggaaggcccgggactgccactatccgatctacgctccccgtgtcttacgagcagacagaatatatttgccgactggcaggatatccagacggaatacccgtcctggaacaccacggttctcaccagcctccaccgagagatccaaccgagcgacaggtaatcagagccgtggaaggagcgggtattggcgtggcagttctcgttgctgtcgtacttgccggcacggctgttgtgtatctcactcacgccagcagcgtgcgatacaggcgcctcagatgataagcgcgcagcgcttagacgtctcgcgatcgatgctagtgtgaaatagacatcagaattaagaaaaacgtagggtccaagtggttccccgttatggactcgctatctgtcaaccagatcttataccctgaagttcacctagatagcccgatagttaccaataagatagtagccatcctggagtatgctcgagtccctcacgcttacagcctggaggaccctacactgtgtcagaacatcaagcaccgcctaaaaaacggattttccaaccaaatgattataaacaatgtggaagttgggaatgtcatcaagtccaagcttaggagttatccggcccactctcatattccatatccaaattgtaatcaggatttatttaacatagaagacaaagagtcaacgaggaagatccgtgaactcctcaaaaaggggaattcgctgtactccaaagtcagtgataaggttttccaatgcttaagggacactaactcacggcttggcctaggctccgaattgagggaggacatcaaggagaaagttattaacttgggagtttacatgcacagctcccagtggtttgagccctttctgttttggtttacagtcaagactgagatgaggtcagtgattaaatcacaaacccatacttgccataggaggagacacacacctgtattcttcactggtagttcagttgagttgctaatctctcgtgaccttgttgctataatcagtaaagagtctcaacatgtatattacctgacatttgaactggttttgatgtattgtgatgtcatagaggggaggttaatgacagagaccgctatgactattgatgctaggtatacagagcttctaggaagagtcagatacatgtggaaactgatagatggtttcttccctgcactcgggaatccaacttatcaaattgtagccatgctggagcctctttcacttgcttacctgcagctgagggatataacagtagaactcagaggtgctttccttaaccactgctttactgaaatacatgatgttcttgaccaaaacgggttttctgatgaaggtacttatcatgagttaactgaagctctagattacattttcataactgatgacatacatctgacaggggagattttctcatttttcagaagtttcggccaccccagacttgaagcagtaacggctgctgaaaatgttaggaaatacatgaatcagcctaaagtcattgtgtatgagactctgatgaaaggtcatgccatattttgtggaatcataatcaacggctatcgtgacaggcacggaggcagttggccaccgctgaccctccccctgcatgctgcagacacaatccggaatgctcaagcttcaggtgaagggttaacacatgagcagtgcgttgataactggaaatcttttgctggagtgaaatttggctgctttatgcctcttagcctggatagtgatctgacaatgtacctaaaggacaaggcacttgctgctctccaaagggaatgggattcagtttacccgaaagagttcctgcgttacgaccctcccaagggaaccgggtcacggaggcttgtagatgttttccttaatgattcgagctttgacccatatgatgtgataatgtatgttgtaagtggagcttacctccatgaccctgagttcaacctgtcttacagcctgaaagaaaaggagatcaaggaaacaggtagactttttgctaaaatgacttacaaaatgagggcatgccaagtgattgctgaaaatctaatctcaaacgggattggcaaatattttaaggacaatgggatggccaaggatgagcacgatttgactaaggcactccacactctagctgtctcaggagtccccaaagatctcaaagaaagtcacaggggggggccagtcttaaaaacctactcccgaagcccagtccacacaagtaccaggaacgtgagagcagcaaaagggtttatagggttccctcaagtaattcggcaggaccaagacactgatcatccggagaatatggaagcttacgagacagtcagtgcatttatcacgactgatctcaagaagtactgccttaattggagatatgagaccatcagcttgtttgcacagaggctaaatgagatttacggattgccctcatttttccagtggctgcataagaggcttgagacctctgtcctgtatgtaagtgaccctcattgcccccccgaccttgacgcccatatcccgttatataaagtccccaatgatcaaatcttcattaagtaccctatgggaggtatagaagggtattgtcagaagctgtggaccatcagcaccattccctatctatacctggctgcttatgagagcggagtaaggattgcttcgttagtgcaaggggacaatcagaccatagccgtaacaaaaagggtacccagcacatggccctacaaccttaagaaacgggaagctgctagagtaactagagattactttgtaattcttaggcaaaggctacatgatattggccatcacctcaaggcaaatgagacaattgtttcatcacatttttttgtctattcaaaaggaatatattatgatgggctacttgtgtcccaatcactcaagagcatcgcaagatgtgtattctggtcagagactatagttgatgaaacaagggcagcatgcagtaatattgctacaacaatggctaaaagcatcgagagaggttatgaccgttaccttgcatattccctgaacgtcctaaaagtgatacagcaaattctgatctctcttggcttcacaatcaattcaaccatgacccgggatgtagtcatacccctcctcacaaacaacgacctcttaataaggatggcactgttgcccgctcctattggggggatgaattatctgaatatgagcaggctgtttgtcagaaacatcggtgatccagtaacatcatcaattgctgatctcaagagaatgattctcgcctcactaatgcctgaagagaccctccatcaagtaatgacacaacaaccgggggactcttcattcctagactgggctagcgacccttactcagcaaatcttgtatgtgtccagagcatcactagactcctcaagaacataactgcaaggtttgtcctgatccatagtccaaacccaatgttaaaaggattattccatgatgacagtaaagaagaggacgagggactggcggcattcctcatggacaggcatattatagtacctagggcagctcatgaaatcctggatcatagtgtcacaggggcaagagagtctattgcaggcatgctggataccacaaaaggcttgattcgagccagcatgaggaagggggggttaacctctcgagtgataaccagattgtccaattatgactatgaacaattcagagcagggatggtgctattgacaggaagaaagagaaatgtcctcattgacaaagagtcatgttcagtgcagctggcgagagctctaagaagccatatgtgggcgaggctagctcgaggacggcctatttacggccttgaggtccctgatgtactagaatctatgcgaggccaccttattcggcgtcatgagacatgtgtcatctgcgagtgtggatcagtcaactacggatggttttttgtcccctcgggttgccaactggatgatattgacaaggaaacatcatccttgagagtcccatatattggttctaccactgatgagagaacagacatgaagcttgccttcgtaagagccccaagtcgatccttgcgatctgctgttagaatagcaacagtgtactcatgggcttacggtgatgatgatagctcttggaacgaagcctggttgttggctaggcaaagggccaatgtgagcctggaggagctaagggtgatcactcccatctcaacttcgactaatttagcgcataggttgagggatcgtagcactcaagtgaaatactcaggtacatcccttgtccgagtggcgaggtataccacaatctccaacgacaatctctcatttgtcatatcagataagaaggttgatactaactttatataccaacaaggaatgcttctagggttgggtgttttagaaacattgtttcgactcgagaaagataccggatcatctaacacggtattacatcttcacgtcgaaacagattgttgcgtgatcccgatgatagatcatcccaggatacccagctcccgcaagctagagctgagggcagagctatgtaccaacccattgatatatgataatgcacctttaattgacagagatgcaacaaggctatacacccagagccataggaggcaccttgtggaatttgttacatggtccacaccccaactatatcacattttagctaagtccacagcactatctatgattgacctggtaacaaaatttgagaaggaccatatgaatgaaatttcagctctcataggggatgacgatatcaatagtttcataactgagtttctgctcatagagccaagattattcactatctacttgggccagtgtgcggccatcaattgggcatttgatgtacattatcatagaccatcagggaaatatcagatgggtgagctgttgtcatcgttcctttctagaatgagcaaaggagtgtttaaggtgcttgtcaatgctctaagccacccaaagatctacaagaaattctggcattgtggtattatagagcctatccatggtccttcacttgatgctcaaaacttgcacacaactgtgtgcaacatggtttacacatgctatatgacctacctcgacctgttgttgaatgaagagttagaagagttcacatttctcttgtgtgaaagcgacgaggatgtagtaccggacagattcgacaacatccaggcaaaacacttatgtgttctggcagatttgtactgtcaaccagggacctgcccaccaattcgaggtctaagaccggtagagaaatgtgcagttctaaccgaccatatcaaggcagaggctatgttatctccagcaggatcttcgtggaacataaatccaattattgtagaccattactcatgctctctgacttatctccggcgaggatcgatcaaacagataagattgagagttgatccaggattcattttcgacgccctcgctgaggtaaatgtcagtcagccaaagatcggcagcaacaacatctcaaatatgagcatcaaggctttcagacccccacacgatgatgttgcaaaattgctcaaagatatcaacacaagcaagcacaatcttcccatttcagggggcaatctcgccaattatgaaatccatgctttccgcagaatcgggttgaactcatctgcttgctacaaagctgttgagatatcaacattaattaggagatgccttgagccaggggaggacggcttgttcttgggtgagggatcgggttctatgttgatcacttataaagagatacttaaactaaacaagtgcttctataatagtggggtttccgccaattctagatctggtcaaagggaattagcaccctatccctccgaagttggccttgtcgaacacagaatgggagtaggtaatattgtcaaagtgctctttaacgggaggcccgaagtcacgtgggtaggcagtgtagattgcttcaatttcatagttagtaatatccctacctctagtgtggggtttatccattcagatatagagaccttgcctgacaaagatactatagagaagctagaggaattggcagccatcttatcgatggctctgctcctgggcaaaataggatcaatactggtgattaagcttatgcctttcagcggggattttgttcagggatttataagttatgtagggtctcattatagagaagtgaaccttgtataccctagatacagcaacttcatctctactgaatcttatttggttatgacagatctcaaggctaaccggctaatgaatcctgaaaagattaagcagcagataattgaatcatctgtgaggacttcacctggacttataggtcacatcctatccattaagcaactaagctgcatacaagcaattgtgggagacgcagttagtagaggtgatatcaatcctactctgaaaaaacttacacctatagagcaggtgctgatcaattgcgggttggcaattaacggacctaagctgtgcaaagaattgatccaccatgatgttgcctcagggcaagatggattgcttaattctatactcatcctctacagggagttggcaagattcaaagacaaccaaagaagtcaacaagggatgttccacgcttaccccgtattggtaagtagcaggcaacgagaacttatatctaggatcacccgcaaattctgggggcacattcttctttactccgggaacaaaaagttgataaataagtttatccagaatctcaagtccggctatctgatactagacttacaccagaatatcttcgttaagaatctatccaagtcagagaaacagattattatgacggggggtttgaaacgtgagtgggtttttaaggtaacagtcaaggagaccaaagaatggtataagttagtcggatacagtgccctgattaaggactaattggttgaactccggaaccctaatcctgccctaggtggttaggcattatttgcaatatattaaagaaaactttgaaaatacgaagtttctattcccagctttgtctggt

SEQ ID NO: 75 - DNA, 21587 bp, synthetic construct
  source 1..21587: mol_type = other DNA
accaaacaaagttgggtaaggatagttcaatcaatgatcatcttctagtgcacttaggattcaagatcctattatcagggacaagagcaggattagggatatccgagatggccacacttttaaggagcttagcattgttcaaaagaaacaaggacaaaccacccattacatcaggatccggtggagccatcagaggaatcaaacacattattatagtaccaatccctggagattcctcaattaccactcgatccagacttctggaccggttggtgaggttaattggaaacccggatgtgagcgggcccaaactaacaggggcactaataggtatattatccttatttgtggagtctccaggtcaattgattcagaggatcaccgatgaccctgacgttagcataaggctgttagaggttgtccagagtgaccagtcacaatctggccttaccttcgcatcaagaggtaccaacatggaggatgaggcggaccaatacttttcacatgatgatccaattagtagtgatcaatccaggttcggatggttcgggaacaaggaaatctcagatattgaagtgcaagaccctgagggattcaacatgattctgggtaccatcctagcccaaatttgggtcttgctcgcaaaggcggttacggccccagacacggcagctgattcggagctaagaaggtggataaagtacacccaacaaagaagggtagttggtgaatttagattggagagaaaatggttggatgtggtgaggaacaggattgccgaggacctctccttacgccgattcatggtcgctctaatcctggatatcaagagaacacccggaaacaaacccaggattgctgaaatgatatgtgacattgatacatatatcgtagaggcaggattagccagttttatcctgactattaagtttgggatagaaactatgtatcctgctcttggactgcatgaatttgctggtgagttatccacacttgagtccttgatgaacctttaccagcaaatgggggaaactgcaccctacatggtaatcctggagaactcaattcagaacaagttcagtgcaggatcataccctctgctctggagctatgccatgggagtaggagtggaacttgaaaactccatgggaggtttgaactttggccgatcttactttgatccagcatattttagattagggcaagagatggtaaggaggtcagctggaaaggtcagttccacattggcatctgaactcggtatcactgccgaggatgcaaggcttgtttcagagattgcaatgcatactactgaggacaagatcagtagagcggttggacccagacaagcccaagtatcatttctacacggtgatcaaagtgagaatgagctaccgagattggggggcaaggaagataggagggtcaaacagagtcgaggagaagccagggagagctacagagaaaccgggcccagcagagcaagtgatgcgagagctgcccatcttccaaccggcacacccctagacattgacactgcaacggagtccagccaagatccgcaggacagtcgaaggtcagctgacgccctgcttaggctgcaagccatggcaggaatctcggaagaacaaggctcagacacggacacccctatagtgtacaatgacagaaatcttctagactaggtgcgagaggccgagggccagaacaacatccgcctaccatccatcattgttataaaaaacttaggaccaggtccacacagccgccagcccatcaaccatccactcccacgattggagccaatggcagaagagcaggcacgccatgtcaaaaacggactggaatgcatccgggctctcaaggccgagcccatcggctcactggccatcgaggaagctatggcagcatggtcagaaatatcagacaacccaggacaggagcgagccacctgcagggaagagaaggcaggcagttcgggtctcagcaaaccatgcctctcagcaattggatcaactgaaggcggtgcacctcgcatccgcggtcagggacctggagagagcgatgacgacgctgaaactttgggaatccccccaagaaatctccaggcatcaagcactgggttacagtgttattacgtttatgatcacagcggtgaagcggttaagggaatccaagatgctgactctatcatggttcaatcaggccttgatggtgatagcaccctctcaggaggagacaatgaatctgaaaacagcgatgtggatattggcgaacctgataccgagggatatgctatcactgaccggggatctgctcccatctctatggggttcagggcttctgatgttgaaactgcagaaggaggggagatccacgagctcctgagactccaatccagaggcaacaactttccgaagcttgggaaaactctcaatgttcctccgcccccggaccccggtagggccagcacttccgggacacccattaaaaagggcacagacgcgagattagcctcatttggaacggagatcgcgtctttattgacaggtggtgcaacccaatgtgctcgaaagtcaccctcggaaccatcagggccaggtgcacctgcggggaatgtccccgagtgtgtgagcaatgccgcactgatacaggagtggacacccgaatctggtaccacaatctccccgagatcccagaataatgaagaagggggagactattatgatgatgagctgttctctgatgtccaagatattaaaacagccttggccaaaatacacgaggataatcagaagataatctccaagctagaatcactgctgttattgaagggagaagttgagtcaattaagaagcagatcaacaggcaaaatatcagcatatccaccctggaaggacacctctcaagcatcatgatcgccattcctggacttgggaaggatcccaacgaccccactgcagatgtcgaaatcaatcccgacttgaaacccatcataggcagagattcaggccgagcactggccgaagttctcaagaaacccgttgccagccgacaactccaaggaatgacaaatggacggaccagttccagaggacagctgctgaaggaatttcagctaaagccgatcgggaaaaagatgagctcagccgtcgggtttgttcctgacaccggccctgcatcacgcagtgtaatccgctccattataaaatccagccggctagaggaggatcggaagcgttacctgatgactctccttgatgatatcaaaggagccaatgatcttgccaagttccaccagatgctgatgaagataataatgaagtagctacagctcaacttacctgccaaccccatgccagtcgacccaactagtacaacctaaatccattataaaaaacttaggagcaaagtgattgcctcccaaggtccacaatgacagagacctacgacttcgacaagtcggcatgggacatcaaagggtcgatcgctccgatacaacccaccacctacagtgatggcaggctggtgccccaggtcagagtcatagatcctggtctaggcgacaggaaggatgaatgctttatgtacatgtttctgctgggggttgttgaggacagcgattccctagggcctccaatcgggcgagcatttgggttcctgcccttaggtgttggcagatccacagcaaagcccgaaaaactcctcaaagaggccactgagcttgacatagttgttagacgtacagcagggctcaatgaaaaactggtgttctacaacaacaccccactaactctcctcacaccttggagaaaggtcctaacaacagggagtgtcttcaacgcaaaccaagtgtgcaatgcggttaatctgataccgctcgataccccgcagaggttccgtgttgtttatatgagcatcacccgtctttcggataacgggtattacaccgttcctagaagaatgctggaattcagatcggtcaatgcagtggccttcaacctgctggtgacccttaggattgacaaggcgataggccctgggaagatcatcgacaatacagagcaacttcctgaggcaacatttatggtccacatcgggaacttcaggagaaagaagagtgaagtctactctgccgattattgcaaaatgaaaatcgaaaagatgggcctggtttttgcacttggtgggatagggggcaccagtcttcacattagaagcacaggcaaaatgagcaagactctccatgcacaactcgggttcaagaagaccttatgttacccgctgatggatatcaatgaagaccttaatcgattactctggaggagcagatgcaagatagtaagaatccaggcagttttgcagccatcagttcctcaagaattccgcatttacgacgacgtgatcataaatgatgaccaaggactattcaaagttctgtagaccgtagtgcccagcaatgcccgaaaacgacccccctcacaatgacagccagaaggcccggacaaaaaagccccctccgaaagactccacggaccaagcgagaggccagccagcagccgacggcaagcgcgaacaccaggcggccccagcacagaacagccctgacacaaggccaccaccagccaccccaatctgcatcctcctcgtgggacccccgaggaccaacccccaaggctgcccccgatccaaaccaccaaccgcatccccaccacccccgggaaagaaacccccagcaattggaaggcccctccccctcttcctcaacacaagaactccacaaccgaaccgcacaagcgaccgaggtgacccaaccgcaggcatccgactccctagacagatcctctctccccggcaaactaaacaaaacttagggccaaggaacatacacacccaacagaacccagaccccggcccacggcgccgcgcccccaacccccgacaaccagagggagcccccaaccaatcccgccggctcccccggtgcccacaggcagggacaccaacccccgaacagacccagcacccaaccatcgacaatccaagacgggggggcccccccaaaaaaaggcccccaggggccgacagccagcaccgcgaggaagcccacccaccccacacacgaccacggcaaccaaaccagaacccagaccaccctgggccaccagctcccagactcggccatcaccccgcagaaaggaaaggccacaacccgcgcaccccagccccgatccggcggggagccacccaacccgaaccagcacccaagagcgatccccgaaggacccccgaaccgcaaaggacatcagtatcccacagcctctccaagtcccccggtctcctcctcttctcgaagggaccaaaagatcaatccaccacacccgacgacactcaactccccacccctaaaggagacaccgggaatcccagaatcaagactcatccaatgtccatcatgggtctcaaggtgaacgtctctgccatattcatggcagtactgttaactctccaaacacccaccggtcaaatccattggggcaatctctctaagataggggtggtaggaataggaagtgcaagctacaaagttatgactcgttccagccatcaatcattagtcataaaattaatgcccaatataactctcctcaataactgcacgagggtagagattgcagaatacaggagactactgagaacagttttggaaccaattagagatgcacttaatgcaatgacccagaatataagaccggttcagagtgtagcttcaagtaggagacacaagagatttgcgggagtagtcctggcaggtgcggccctaggcgttgccacagctgctcagataacagccggcattgcacttcaccagtccatgctgaactctcaagccatcgacaatctgagagcgagcctggaaactactaatcaggcaattgagacaatcagacaagcagggcaggagatgatattggctgttcagggtgtccaagactacatcaataatgagctgataccgtctatgaaccaactatcttgtgatttaatcggccagaagctcgggctcaaattgctcagatactatacagaaatcctgtcattatttggccccagtttacgggaccccatatctgcggagatatctatccaggctttgagctatgcgcttggaggagacatcaataaggtgttagaaaagctcggatacagtggaggtgatttactgggcatcttagagagcggaggaataaaggcccggataactcacgtcgacacagagtcctacttcattgtcctcagtatagcctatccgacgctgtccgagattaagggggtgattgtccaccggctagagggggtctcgtacaacataggctctcaagagtggtataccactgtgcccaagtatgttgcaacccaagggtaccttatctcgaattttgatgagtcatcgtgtactttcatgccagaggggactgtgtgcagccaaaatgccttgtacccgatgagtcctctgctccaagaatgcctccgggggtacaccaagtcctgtgctcgtacactcgtatccgggtcttttgggaaccggttcattttatcacaagggaacctaatagccaattgtgcatcaatcctttgcaagtgttacacaacaggaacgatcattaatcaagaccctgacaagatcctaacatacattgctgccgatcactgcccggtagtcgaggtgaacggcgtgaccatccaagtcgggagcaggaggtatccagacgctgtgtacttgcacagaattgacctcggtcctcccatatcattggagaggttggacgtagggacaaatctggggaatgcaattgctaagttggaggatgccaaggaattgttggagtcatcggaccagatattgaggagtatgaaaggtttatcgagcactagcatagtctacatcctgattgcagtgtgtcttggagggttgatagggatccccgctttaatatgttgctgcagggggcgttgtaacaaaaagggagaacaagttggtatgtcaagaccaggcctaaagcctgatcttacgggaacatcaaaatcctatgtaaggtcgctctgatcctctacaactcttgaaacacaaatgtcccacaagtctcctcttcgtcatcaagcaaccaccgcacccagcatcaagcccacctgaaattatctccggcttccctctggccgaacaatatcggtagttaatcaaaacttagggtgcaagatcatccacaatgtcaccacaacgagaccggataaatgccttctacaaagataacccccatcccaagggaagtaggatagtcattaacagagaacatcttatgattgatagaccttatgttttgctggctgttctgtttgtcatgtttctgagcttgatcgggttgctagccattgcaggcattagacttcatcgggcagccatctacaccgcagagatccataaaagcctcagcaccaatctagatgtaactaactcaatcgagcatcaggtcaaggacgtgctgacaccactcttcaaaatcatcggtgatgaagtgggcctgaggacacctcagagattcactgacctagtgaaattaatctctgacaagattaaattccttaatccggatagggagtacgacttcagagatctcacttggtgtatcaacccgccagagagaatcaaattggattatgatcaatactgtgcagatgtggctgctgaagagctcatgaatgcattggtgaactcaactctactggagaccagaacaaccaatcagttcctagctgtctcaaagggaaactgctcagggcccactacaatcagaggtcaattctcaaacatgtcgctgtccctgttagacttgtatttaggtcgaggttacaatgtgtcatctatagtcactatgacatcccagggaatgtatgggggaacttacctagtggaaaagcctaatctgagcagcaaaaggtcagagttgtcacaactgagcatgtaccgagtgtttgaagtaggtgttatcagaaatccgggtttgggggctccggtgttccatatgacaaactatcttgagcaaccagtcagtaatgatctcagcaactgtatggtggctttgggggagctcaaactcgcagccctttgtcacggggaagattctatcacaattccctatcagggatcagggaaaggtgtcagcttccagctcgtcaagctaggtgtctggaaatccccaaccgacatgcaatcctgggtccccttatcaacggatgatccagtgatagacaggctttacctctcatctcacagaggtgttatcgctgacaatcaagcaaaatgggctgtcccgacaacacgaacagatgacaagttgcgaatggagacatgcttccaacaggcgtgtaagggtaaaatccaagcactctgcgagaatcccgagtgggcaccattgaaggataacaggattccttcatacggggtcttgtctgttgatctgagtctgacagttgagcttaaaatcaaaattgcttcgggattcgggccattgatcacacacggttcagggatggacctatacaaatccaaccacaacaatgtgtattggctgactatcccgccaatgaagaacctagccttaggtgtaatcaacacattggagtggataccgagattcaaggttagtccctacctcttcactgtcccaattaaggaagcaggcgaagactgccatgccccaacatacctacctgcggaggtggatggtgatgtcaaactcagttccaatctggtgattctacctggtcaagatctccaatatgttttggcaacctacgatacttccagggttgaacatgctgtggtttattacgtttacagcccaagccgctcattttcttacttttatccttttaggttgcctataaagggggtccccatcgaattacaagtggaatgcttcacatgggaccaaaaactctggtgccgtcacttctgtgtgcttgcggactcagaatctggtggacatatcactcactctgggatggtgggcatgggagtcagctgcacagtcacccgggaagatggaaccaatcgcagatagggctgctagtgaaccaatcacatgatgtcacccagacatcaggcatacccactagtctaccctccatcattgttataaaaaacttaggaaccaggtccacacagccgccagcccatcaacgcgtacggccaccatgggtagacttacaagtggggtgggaactgccgcacttttggttgttgctgtgggcttgcgagtggtttgcgctaaatacgcactcgccgatccgtccctcaaaatggcagaccccaatcggtttcggggcaagaatttgccagtccttgaccagctgacagaccctccaggggttaagagagtgtatcacatccagccctcccttgaggaccccttccaacccccatctataccgatcaccgtgtattacgccgtgctcgaacgcgcttgcaggtctgtgttgctgcacgcaccatctgaggctccccagattgttagaggggcaagcgacgaagcgagaaagcacacttacaacctcaccatagcttggtaccgcatgggcgacaactgcgccatcccaatcactgttatggaatatactgagtgcccttacaataaatctctgggtgtgtgtcctattaggacacagcctcgctggagctactatgactccttctctgccgtgagtgaagataatttgggtttcctgatgcacgcacccgcctttgagacagcaggtacgtaccttaggcttgtaaaaatcaacgattggaccgagataacccagtttattctggagcacagggctagagcatcctgtaaatacgcgttgccactccggataccaccagccgcttgcttgacctccaaggcttatcaacagggcgtaacggtggattccatcggcatgctccctaggttcatccctgaaaatcaaagaacggtggcactgtattcactcaagattgccggctggcacggccctaagccaccatacacctctactctgctgcccccggagctgagtgataccactaacgcaacccagcctgaactggtgccagaggatcctgaagattctgcattgctggaagacccagccggcactgtgtctagtcaaattccccctaattggcacataccgagcattcaggacgttgctccacaccacgctccggctgctccaagcaatcctggcctgataataggtgcattggccggttctaccctcgccgtcctggtgattgggggtatcgccttctgggttaggaggagagctcaaatggcccccaagcgcttgaggttgccgcacataagagacgacgacgcccccccttctcaccagcctctgttttattagttcgaactacagctcaacttacctgccaaccccatgccagtcgacccaactagtacaacctaaatccattataaaaaacttaggaaccaggtccacacagccgccagcccatcaaccatccactcccacgattggaggccggccatgaggggaggaggccttgtctgtgcacttgttgtaggagctttggtcgccgccgtagctagtgcagctccagcagcaccaagggcttcaggaggggttgcagctactgttgctgctaacggaggacctgctagccaaccacctccggtgccttctccggctactaccaaagcccgcaagcgaaaaacaaagaagcccccaaagaggccagaggccacacctccacccgacgctaacgctactgtggcggctggacacgctactttgagagcccacctgcgggaaatcaaggttgagaacgcagacgcacaattctacgtttgtcccccccctacaggtgcaacagtcgtgcagtttgagcagccaagacgctgtcctactaggcctgagggacaaaattacaccgagggtatcgccgtagtttttaaggagaatatcgcaccctataagtttaaagcgacaatgtactataaggatgtgaccgtcagccaagtctggtttggtcaccgatacagtcagtttatgggaatctttgaggaccgggccccggtccctttcgaagaagtgatcgacaagattaacgccaagggagtgtgcaggtcaaccgcaaagtacgtccgaaacaatatggaaacaaccgccttccacagggacgaccacgaaacagatatggagcttaagccggctaaagtggccactcgcacgtcaagaggttggcataccacggacctgaaatataacccttctagagttgaagctttccaccggtatgggaccacggtgaactgtattgtggaagaagtggacgccagatccgtgtacccctacgacgaattcgttcttgctacaggcgatttcgtgtatatgtctcctttctacggctacagggagggctcccacaccgagcacacctcctacgccgcagatagatttaaacaggtggacggcttctacgctcgcgatctgactactaaggcacgggcaacaagcccaacaactcgcaatttgctgaccacaccaaagtttactgtggcctgggactgggtacccaagaggcctgctgtttgcacaatgaccaaatggcaggaggttgacgagatgctccgggccgaatatggaggatcctttagattctcttctgacgctatcagtaccaccttcaccacaaatctgactcagtactctctgtctcgcgtagatctgggagactgtatcggtagggacgcacgcgaggctatagatcggatgttcgcccggaaatacaacgccacccacattaaagtggggcagccccagtattacttggctactgggggcttccttatcgcttatcagcctctgctctcaaataccctggcggagctttatgtacgcgagtatatgagggagcaggacaggaagccacgcaacgctaccccagcacccctgagagaagcgccttctgccaacgcgagtgtggaacgaattaagaccacgtcttcaatcgaattcgctcggctccaatttacctacaaccacattcaacgccacgttaacgatatgctgggaaggattgcagttgcttggtgtgagctccagaaccacgaactgacactgtggaacgaggccagaaagcttaacccaaacgctattgcttccgcgacagttggaagaagagtgtctgcacgaatgctcggcgacgttatggctgttagtacctgtgtgcctgtggcccctgacaatgtaattgttcagaacagtatgagagtctcttctagacccggcacttgctactccaggccactggtctcttttcgctacgaggatcaggggcctttgatcgagggccagttgggagagaataacgaactgcgcctgaccagagacgctctggaaccctgtacagtcggccacagacgatattttatattcggcggcggttacgtatattttgaagagtatgcgtactcccaccaactgtccagagcagatgtgaccactgtgagcacttttatcgatctcaatatcactatgctggaggatcacgagtttgttccgttggaagtgtacactcggcacgagatcaaggacagtggcctgctcgattataccgaagtccagaggcgcaatcaactgcacgatctgagatttgccgatattgacacagtgattagggctgacgctaacgccgctatgtttgctggcctgtgtgcctttttcgagggaatgggtgatctcggaagagccgtaggcaaggtggttatgggagtcgtaggtggcgtcgttagtgccgtgtcaggggtgtctagctttatgtctaaccccttcggagctttggctgtgggtctcctggtacttgccggactggtggccgcattttttgcctttaggtacgtcctgcagctgcagaggaatccaatgaaggccctgtatccacttacaacaaaggaacttaaaacctccgatcctggaggagttggaggagaaggcgaagagggagcggaaggtggtgggtttgacgaggccaagttggctgaggcccgagagatgataaggtatatggctctcgtatctgcaatggagagaactgagcacaaagctcgcaagaagggaaccagtgccctgctgagcagcaaagtgacaaatatggtgcttcgaaaacgcaataaggctcgctactctcctctgcacaacgaggacgaagcaggggatgaggacgaactctgactattcgaactactcagctagtctacgcgccgtagcctaccctccatcattgttataaaaaacttaggagcaaagtccacacagccgccgataaggtccacaatggcattgggtagagttggtttggctgtgggactttggggtctcctctgggtcggtgtggttgtcgtactggctaacgcttctccaggccgcactattactgttggaccgagagggaacgcttccaacgctgctccctctgcctcccctaggaacgcttctgctcctagaactacacctactccaccgcaaccccgcaaagcaaccaaaagcaaggcctcaaccgctaaaccagctcctccaccgaagacaggcccacctaaaaccagcagcgagcccgtgcggtgtaatcgacacgatcccctggcccgatacggtagtcgggtgcaaatccgctgtaggtttcctaatagtactagaacagaaagcaggctgcagatctggagatacgccactgccactgacgcagaaatcgggaccgccccttcccttgaggaggtgatggtgaacgtaagcgctccaccaggaggtcagctcgtctacgactcagcacccaataggaccgatccacacgtgatttgggcagaaggagctggaccaggcgcctctccaaggttgtattccgttgtaggcccactgggtcggcagagactgattatcgaagaactgactctggaaacccagggaatgtactattgggtttggggaaggactgataggcctagtgcttacggtacttgggtgagagtcagggtatttcggcctccttccctgactatacacccacacgcagtgctcgagggtcagcctttcaaggccacttgcacagccgcaacttactaccctgggaaccgagcagagtttgtgtggtttgaagacgggcggagagtttttgaccccgcacagatccacacgcagacccaggaaaaccctgacggattctccaccgttagcactgtgacctctgccgcagttggaggacaaggaccgccaaggaccttcacctgtcagctgacctggcaccgcgactctgtttcagcgtctagacggaacgcgagcggtactgcctctgtgctccccagacccacaatcacaatggagttcaccggcgatcacgccgtgtgtacggctggttgtgtacccgaaggcgtgacctttgcttggtttttgggagacgatagctcacctgccgagaaagtcgcagtggcttcacaaacttcctgcggaaggcccgggactgccactatccgatctacgctccccgtgtcttacgagcagacagaatatatttgccgactggcaggatatccagacggaatacccgtcctggaacaccacggttctcaccagcctccaccgagagatccaaccgagcgacaggtaatcagagccgtggaaggagcgggtattggcgtggcagttctcgttgctgtcgtacttgccggcacggctgttgtgtatctcactcacgccagcagcgtgcgatacaggcgcctcagatgataagcgcgcagcgcttagacgtctcgcgatcgatgctagtgtgaaatagacatcagaattaagaaaaacgtagggtccaagtggttccccgttatggactcgctatctgtcaaccagatcttataccctgaagttcacctagatagcccgatagttaccaataagatagtagccatcctggagtatgctcgagtccctcacgcttacagcctggaggaccctacactgtgtcagaacatcaagcaccgcctaaaaaacggattttccaaccaaatgattataaacaatgtggaagttgggaatgtcatcaagtccaagcttaggagttatccggcccactctcatattccatatccaaattgtaatcaggatttatttaacatagaagacaaagagtcaacgaggaagatccgtgaactcctcaaaaaggggaattcgctgtactccaaagtcagtgataaggttttccaatgcttaagggacactaactcacggcttggcctaggctccgaattgagggaggacatcaaggagaaagttattaacttgggagtttacatgcacagctcccagtggtttgagccctttctgttttggtttacagtcaagactgagatgaggtcagtgattaaatcacaaacccatacttgccataggaggagacacacacctgtattcttcactggtagttcagttgagttgctaatctctcgtgaccttgttgctataatcagtaaagagtctcaacatgtatattacctgacatttgaactggttttgatgtattgtgatgtcatagaggggaggttaatgacagagaccgctatgactattgatgctaggtatacagagcttctaggaagagtcagatacatgtggaaactgatagatggtttcttccctgcactcgggaatccaacttatcaaattgtagccatgctggagcctctttcacttgcttacctgcagctgagggatataacagtagaactcagaggtgctttccttaaccactgctttactgaaatacatgatgttcttgaccaaaacgggttttctgatgaaggtacttatcatgagttaactgaagctctagattacattttcataactgatgacatacatctgacaggggagattttctcatttttcagaagtttcggccaccccagacttgaagcagtaacggctgctgaaaatgttaggaaatacatgaatcagcctaaagtcattgtgtatgagactctgatgaaaggtcatgccatattttgtggaatcataatcaacggctatcgtgacaggcacggaggcagttggccaccgctgaccctccccctgcatgctgcagacacaatccggaatgctcaagcttcaggtgaagggttaacacatgagcagtgcgttgataactggaaatcttttgctggagtgaaatttggctgctttatgcctcttagcctggatagtgatctgacaatgtacctaaaggacaaggcacttgctgctctccaaagggaatgggattcagtttacccgaaagagttcctgcgttacgaccctcccaagggaaccgggtcacggaggcttgtagatgttttccttaatgattcgagctttgacccatatgatgtgataatgtatgttgtaagtggagcttacctccatgaccctgagttcaacctgtcttacagcctgaaagaaaaggagatcaaggaaacaggtagactttttgctaaaatgacttacaaaatgagggcatgccaagtgattgctgaaaatctaatctcaaacgggattggcaaatattttaaggacaatgggatggccaaggatgagcacgatttgactaaggcactccacactctagctgtctcaggagtccccaaagatctcaaagaaagtcacaggggggggccagtcttaaaaacctactcccgaagcccagtccacacaagtaccaggaacgtgagagcagcaaaagggtttatagggttccctcaagtaattcggcaggaccaagacactgatcatccggagaatatggaagcttacgagacagtcagtgcatttatcacgactgatctcaagaagtactgccttaattggagatatgagaccatcagcttgtttgcacagaggctaaatgagatttacggattgccctcatttttccagtggctgcataagaggcttgagacctctgtcctgtatgtaagtgaccctcattgcccccccgaccttgacgcccatatcccgttatataaagtccccaatgatcaaatcttcattaagtaccctatgggaggtatagaagggtattgtcagaagctgtggaccatcagcaccattccctatctatacctggctgcttatgagagcggagtaaggattgcttcgttagtgcaaggggacaatcagaccatagccgtaacaaaaagggtacccagcacatggccctacaaccttaagaaacgggaagctgctagagtaactagagattactttgtaattcttaggcaaaggctacatgatattggccatcacctcaaggcaaatgagacaattgtttcatcacatttttttgtctattcaaaaggaatatattatgatgggctacttgtgtcccaatcactcaagagcatcgcaagatgtgtattctggtcagagactatagttgatgaaacaagggcagcatgcagtaatattgctacaacaatggctaaaagcatcgagagaggttatgaccgttaccttgcatattccctgaacgtcctaaaagtgatacagcaaattctgatctctcttggcttcacaatcaattcaaccatgacccgggatgtagtcatacccctcctcacaaacaacgacctcttaataaggatggcactgttgcccgctcctattggggggatgaattatctgaatatgagcaggctgtttgtcagaaacatcggtgatccagtaacatcatcaattgctgatctcaagagaatgattctcgcctcactaatgcctgaagagaccctccatcaagtaatgacacaacaaccgggggactcttcattcctagactgggctagcgacccttactcagcaaatcttgtatgtgtccagagcatcactagactcctcaagaacataactgcaaggtttgtcctgatccatagtccaaacccaatgttaaaaggattattccatgatgacagtaaagaagaggacgagggactggcggcattcctcatggacaggcatattatagtacctagggcagctcatgaaatcctggatcatagtgtcacaggggcaagagagtctattgcaggcatgctggataccacaaaaggcttgattcgagccagcatgaggaagggggggttaacctctcgagtgataaccagattgtccaattatgactatgaacaattcagagcagggatggtgctattgacaggaagaaagagaaatgtcctcattgacaaagagtcatgttcagtgcagctggcgagagctctaagaagccatatgtgggcgaggctagctcgaggacggcctatttacggccttgaggtccctgatgtactagaatctatgcgaggccaccttattcggcgtcatgagacatgtgtcatctgcgagtgtggatcagtcaactacggatggttttttgtcccctcgggttgccaactggatgatattgacaaggaaacatcatccttgagagtcccatatattggttctaccactgatgagagaacagacatgaagcttgccttcgtaagagccccaagtcgatccttgcgatctgctgttagaatagcaacagtgtactcatgggcttacggtgatgatgatagctcttggaacgaagcctggttgttggctaggcaaagggccaatgtgagcctggaggagctaagggtgatcactcccatctcaacttcgactaatttagcgcataggttgagggatcgtagcactcaagtgaaatactcaggtacatcccttgtccgagtggcgaggtataccacaatctccaacgacaatctctcatttgtcatatcagataagaaggttgatactaactttatataccaacaaggaatgcttctagggttgggtgttttagaaacattgtttcgactcgagaaagataccggatcatctaacacggtattacatcttcacgtcgaaacagattgttgcgtgatcccgatgatagatcatcccaggatacccagctcccgcaagctagagctgagggcagagctatgtaccaacccattgatatatgataatgcacctttaattgacagagatgcaacaaggctatacacccagagccataggaggcaccttgtggaatttgttacatggtccacaccccaactatatcacattttagctaagtccacagcactatctatgattgacctggtaacaaaatttgagaaggaccatatgaatgaaatttcagctctcataggggatgacgatatcaatagtttcataactgagtttctgctcatagagccaagattattcactatctacttgggccagtgtgcggccatcaattgggcatttgatgtacattatcatagaccatcagggaaatatcagatgggtgagctgttgtcatcgttcctttctagaatgagcaaaggagtgtttaaggtgcttgtcaatgctctaagccacccaaagatctacaagaaattctggcattgtggtattatagagcctatccatggtccttcacttgatgctcaaaacttgcacacaactgtgtgcaacatggtttacacatgctatatgacctacctcgacctgttgttgaatgaagagttagaagagttcacatttctcttgtgtgaaagcgacgaggatgtagtaccggacagattcgacaacatccaggcaaaacacttatgtgttctggcagatttgtactgtcaaccagggacctgcccaccaattcgaggtctaagaccggtagagaaatgtgcagttctaaccgaccatatcaaggcagaggctatgttatctccagcaggatcttcgtggaacataaatccaattattgtagaccattactcatgctctctgacttatctccggcgaggatcgatcaaacagataagattgagagttgatccaggattcattttcgacgccctcgctgaggtaaatgtcagtcagccaaagatcggcagcaacaacatctcaaatatgagcatcaaggctttcagacccccacacgatgatgttgcaaaattgctcaaagatatcaacacaagcaagcacaatcttcccatttcagggggcaatctcgccaattatgaaatccatgctttccgcagaatcgggttgaactcatctgcttgctacaaagctgttgagatatcaacattaattaggagatgccttgagccaggggaggacggcttgttcttgggtgagggatcgggttctatgttgatcacttataaagagatacttaaactaaacaagtgcttctataatagtggggtttccgccaattctagatctggtcaaagggaattagcaccctatccctccgaagttggccttgtcgaacacagaatgggagtaggtaatattgtcaaagtgctctttaacgggaggcccgaagtcacgtgggtaggcagtgtagattgcttcaatttcatagttagtaatatccctacctctagtgtggggtttatccattcagatatagagaccttgcctgacaaagatactatagagaagctagaggaattggcagccatcttatcgatggctctgctcctgggcaaaataggatcaatactggtgattaagcttatgcctttcagcggggattttgttcagggatttataagttatgtagggtctcattatagagaagtgaaccttgtataccctagatacagcaacttcatctctactgaatcttatttggttatgacagatctcaaggctaaccggctaatgaatcctgaaaagattaagcagcagataattgaatcatctgtgaggacttcacctggacttataggtcacatcctatccattaagcaactaagctgcatacaagcaattgtgggagacgcagttagtagaggtgatatcaatcctactctgaaaaaacttacacctatagagcaggtgctgatcaattgcgggttggcaattaacggacctaagctgtgcaaagaattgatccaccatgatgttgcctcagggcaagatggattgcttaattctatactcatcctctacagggagttggcaagattcaaagacaaccaaagaagtcaacaagggatgttccacgcttaccccgtattggtaagtagcaggcaacgagaacttatatctaggatcacccgcaaattctgggggcacattcttctttactccgggaacaaaaagttgataaataagtttatccagaatctcaagtccggctatctgatactagacttacaccagaatatcttcgttaagaatctatccaagtcagagaaacagattattatgacggggggtttgaaacgtgagtgggtttttaaggtaacagtcaaggagaccaaagaatggtataagttagtcggatacagtgccctgattaaggactaattggttgaactccggaaccctaatcctgccctaggtggttaggcattatttgcaatatattaaagaaaactttgaaaatacgaagtttctattcccagctttgtctggt

SEQ ID NO: 76 - DNA, 21515 bp, synthetic construct
  source 1..21515: mol_type = other DNA
accaaacaaagttgggtaaggatagttcaatcaatgatcatcttctagtgcacttaggattcaagatcctattatcagggacaagagcaggattagggatatccgagatggccacacttttaaggagcttagcattgttcaaaagaaacaaggacaaaccacccattacatcaggatccggtggagccatcagaggaatcaaacacattattatagtaccaatccctggagattcctcaattaccactcgatccagacttctggaccggttggtgaggttaattggaaacccggatgtgagcgggcccaaactaacaggggcactaataggtatattatccttatttgtggagtctccaggtcaattgattcagaggatcaccgatgaccctgacgttagcataaggctgttagaggttgtccagagtgaccagtcacaatctggccttaccttcgcatcaagaggtaccaacatggaggatgaggcggaccaatacttttcacatgatgatccaattagtagtgatcaatccaggttcggatggttcgggaacaaggaaatctcagatattgaagtgcaagaccctgagggattcaacatgattctgggtaccatcctagcccaaatttgggtcttgctcgcaaaggcggttacggccccagacacggcagctgattcggagctaagaaggtggataaagtacacccaacaaagaagggtagttggtgaatttagattggagagaaaatggttggatgtggtgaggaacaggattgccgaggacctctccttacgccgattcatggtcgctctaatcctggatatcaagagaacacccggaaacaaacccaggattgctgaaatgatatgtgacattgatacatatatcgtagaggcaggattagccagttttatcctgactattaagtttgggatagaaactatgtatcctgctcttggactgcatgaatttgctggtgagttatccacacttgagtccttgatgaacctttaccagcaaatgggggaaactgcaccctacatggtaatcctggagaactcaattcagaacaagttcagtgcaggatcataccctctgctctggagctatgccatgggagtaggagtggaacttgaaaactccatgggaggtttgaactttggccgatcttactttgatccagcatattttagattagggcaagagatggtaaggaggtcagctggaaaggtcagttccacattggcatctgaactcggtatcactgccgaggatgcaaggcttgtttcagagattgcaatgcatactactgaggacaagatcagtagagcggttggacccagacaagcccaagtatcatttctacacggtgatcaaagtgagaatgagctaccgagattggggggcaaggaagataggagggtcaaacagagtcgaggagaagccagggagagctacagagaaaccgggcccagcagagcaagtgatgcgagagctgcccatcttccaaccggcacacccctagacattgacactgcaacggagtccagccaagatccgcaggacagtcgaaggtcagctgacgccctgcttaggctgcaagccatggcaggaatctcggaagaacaaggctcagacacggacacccctatagtgtacaatgacagaaatcttctagactaggtgcgagaggccgagggccagaacaacatccgcctaccatccatcattgttataaaaaacttaggaaccaggtccacacagccgccagcccatcaaccatccactcccacgattggagccaatggcagaagagcaggcacgccatgtcaaaaacggactggaatgcatccgggctctcaaggccgagcccatcggctcactggccatcgaggaagctatggcagcatggtcagaaatatcagacaacccaggacaggagcgagccacctgcagggaagagaaggcaggcagttcgggtctcagcaaaccatgcctctcagcaattggatcaactgaaggcggtgcacctcgcatccgcggtcagggacctggagagagcgatgacgacgctgaaactttgggaatccccccaagaaatctccaggcatcaagcactgggttacagtgttattacgtttatgatcacagcggtgaagcggttaagggaatccaagatgctgactctatcatggttcaatcaggccttgatggtgatagcaccctctcaggaggagacaatgaatctgaaaacagcgatgtggatattggcgaacctgataccgagggatatgctatcactgaccggggatctgctcccatctctatggggttcagggcttctgatgttgaaactgcagaaggaggggagatccacgagctcctgagactccaatccagaggcaacaactttccgaagcttgggaaaactctcaatgttcctccgcccccggaccccggtagggccagcacttccgggacacccattaaaaagggcacagacgcgagattagcctcatttggaacggagatcgcgtctttattgacaggtggtgcaacccaatgtgctcgaaagtcaccctcggaaccatcagggccaggtgcacctgcggggaatgtccccgagtgtgtgagcaatgccgcactgatacaggagtggacacccgaatctggtaccacaatctccccgagatcccagaataatgaagaagggggagactattatgatgatgagctgttctctgatgtccaagatattaaaacagccttggccaaaatacacgaggataatcagaagataatctccaagctagaatcactgctgttattgaagggagaagttgagtcaattaagaagcagatcaacaggcaaaatatcagcatatccaccctggaaggacacctctcaagcatcatgatcgccattcctggacttgggaaggatcccaacgaccccactgcagatgtcgaaatcaatcccgacttgaaacccatcataggcagagattcaggccgagcactggccgaagttctcaagaaacccgttgccagccgacaactccaaggaatgacaaatggacggaccagttccagaggacagctgctgaaggaatttcagctaaagccgatcgggaaaaagatgagctcagccgtcgggtttgttcctgacaccggccctgcatcacgcagtgtaatccgctccattataaaatccagccggctagaggaggatcggaagcgttacctgatgactctccttgatgatatcaaaggagccaatgatcttgccaagttccaccagatgctgatgaagataataatgaagtagctacagctcaacttacctgccaaccccatgccagtcgacccaactagtacaacctaaatccattataaaaaacttaggagcaaagtgattgcctcccaaggtccacaatgacagagacctacgacttcgacaagtcggcatgggacatcaaagggtcgatcgctccgatacaacccaccacctacagtgatggcaggctggtgccccaggtcagagtcatagatcctggtctaggcgacaggaaggatgaatgctttatgtacatgtttctgctgggggttgttgaggacagcgattccctagggcctccaatcgggcgagcatttgggttcctgcccttaggtgttggcagatccacagcaaagcccgaaaaactcctcaaagaggccactgagcttgacatagttgttagacgtacagcagggctcaatgaaaaactggtgttctacaacaacaccccactaactctcctcacaccttggagaaaggtcctaacaacagggagtgtcttcaacgcaaaccaagtgtgcaatgcggttaatctgataccgctcgataccccgcagaggttccgtgttgtttatatgagcatcacccgtctttcggataacgggtattacaccgttcctagaagaatgctggaattcagatcggtcaatgcagtggccttcaacctgctggtgacccttaggattgacaaggcgataggccctgggaagatcatcgacaatacagagcaacttcctgaggcaacatttatggtccacatcgggaacttcaggagaaagaagagtgaagtctactctgccgattattgcaaaatgaaaatcgaaaagatgggcctggtttttgcacttggtgggatagggggcaccagtcttcacattagaagcacaggcaaaatgagcaagactctccatgcacaactcgggttcaagaagaccttatgttacccgctgatggatatcaatgaagaccttaatcgattactctggaggagcagatgcaagatagtaagaatccaggcagttttgcagccatcagttcctcaagaattccgcatttacgacgacgtgatcataaatgatgaccaaggactattcaaagttctgtagaccgtagtgcccagcaatgcccgaaaacgacccccctcacaatgacagccagaaggcccggacaaaaaagccccctccgaaagactccacggaccaagcgagaggccagccagcagccgacggcaagcgcgaacaccaggcggccccagcacagaacagccctgacacaaggccaccaccagccaccccaatctgcatcctcctcgtgggacccccgaggaccaacccccaaggctgcccccgatccaaaccaccaaccgcatccccaccacccccgggaaagaaacccccagcaattggaaggcccctccccctcttcctcaacacaagaactccacaaccgaaccgcacaagcgaccgaggtgacccaaccgcaggcatccgactccctagacagatcctctctccccggcaaactaaacaaaacttagggccaaggaacatacacacccaacagaacccagaccccggcccacggcgccgcgcccccaacccccgacaaccagagggagcccccaaccaatcccgccggctcccccggtgcccacaggcagggacaccaacccccgaacagacccagcacccaaccatcgacaatccaagacgggggggcccccccaaaaaaaggcccccaggggccgacagccagcaccgcgaggaagcccacccaccccacacacgaccacggcaaccaaaccagaacccagaccaccctgggccaccagctcccagactcggccatcaccccgcagaaaggaaaggccacaacccgcgcaccccagccccgatccggcggggagccacccaacccgaaccagcacccaagagcgatccccgaaggacccccgaaccgcaaaggacatcagtatcccacagcctctccaagtcccccggtctcctcctcttctcgaagggaccaaaagatcaatccaccacacccgacgacactcaactccccacccctaaaggagacaccgggaatcccagaatcaagactcatccaatgtccatcatgggtctcaaggtgaacgtctctgccatattcatggcagtactgttaactctccaaacacccaccggtcaaatccattggggcaatctctctaagataggggtggtaggaataggaagtgcaagctacaaagttatgactcgttccagccatcaatcattagtcataaaattaatgcccaatataactctcctcaataactgcacgagggtagagattgcagaatacaggagactactgagaacagttttggaaccaattagagatgcacttaatgcaatgacccagaatataagaccggttcagagtgtagcttcaagtaggagacacaagagatttgcgggagtagtcctggcaggtgcggccctaggcgttgccacagctgctcagataacagccggcattgcacttcaccagtccatgctgaactctcaagccatcgacaatctgagagcgagcctggaaactactaatcaggcaattgagacaatcagacaagcagggcaggagatgatattggctgttcagggtgtccaagactacatcaataatgagctgataccgtctatgaaccaactatcttgtgatttaatcggccagaagctcgggctcaaattgctcagatactatacagaaatcctgtcattatttggccccagtttacgggaccccatatctgcggagatatctatccaggctttgagctatgcgcttggaggagacatcaataaggtgttagaaaagctcggatacagtggaggtgatttactgggcatcttagagagcggaggaataaaggcccggataactcacgtcgacacagagtcctacttcattgtcctcagtatagcctatccgacgctgtccgagattaagggggtgattgtccaccggctagagggggtctcgtacaacataggctctcaagagtggtataccactgtgcccaagtatgttgcaacccaagggtaccttatctcgaattttgatgagtcatcgtgtactttcatgccagaggggactgtgtgcagccaaaatgccttgtacccgatgagtcctctgctccaagaatgcctccgggggtacaccaagtcctgtgctcgtacactcgtatccgggtcttttgggaaccggttcattttatcacaagggaacctaatagccaattgtgcatcaatcctttgcaagtgttacacaacaggaacgatcattaatcaagaccctgacaagatcctaacatacattgctgccgatcactgcccggtagtcgaggtgaacggcgtgaccatccaagtcgggagcaggaggtatccagacgctgtgtacttgcacagaattgacctcggtcctcccatatcattggagaggttggacgtagggacaaatctggggaatgcaattgctaagttggaggatgccaaggaattgttggagtcatcggaccagatattgaggagtatgaaaggtttatcgagcactagcatagtctacatcctgattgcagtgtgtcttggagggttgatagggatccccgctttaatatgttgctgcagggggcgttgtaacaaaaagggagaacaagttggtatgtcaagaccaggcctaaagcctgatcttacgggaacatcaaaatcctatgtaaggtcgctctgatcctctacaactcttgaaacacaaatgtcccacaagtctcctcttcgtcatcaagcaaccaccgcacccagcatcaagcccacctgaaattatctccggcttccctctggccgaacaatatcggtagttaatcaaaacttagggtgcaagatcatccacaatgtcaccacaacgagaccggataaatgccttctacaaagataacccccatcccaagggaagtaggatagtcattaacagagaacatcttatgattgatagaccttatgttttgctggctgttctgtttgtcatgtttctgagcttgatcgggttgctagccattgcaggcattagacttcatcgggcagccatctacaccgcagagatccataaaagcctcagcaccaatctagatgtaactaactcaatcgagcatcaggtcaaggacgtgctgacaccactcttcaaaatcatcggtgatgaagtgggcctgaggacacctcagagattcactgacctagtgaaattaatctctgacaagattaaattccttaatccggatagggagtacgacttcagagatctcacttggtgtatcaacccgccagagagaatcaaattggattatgatcaatactgtgcagatgtggctgctgaagagctcatgaatgcattggtgaactcaactctactggagaccagaacaaccaatcagttcctagctgtctcaaagggaaactgctcagggcccactacaatcagaggtcaattctcaaacatgtcgctgtccctgttagacttgtatttaggtcgaggttacaatgtgtcatctatagtcactatgacatcccagggaatgtatgggggaacttacctagtggaaaagcctaatctgagcagcaaaaggtcagagttgtcacaactgagcatgtaccgagtgtttgaagtaggtgttatcagaaatccgggtttgggggctccggtgttccatatgacaaactatcttgagcaaccagtcagtaatgatctcagcaactgtatggtggctttgggggagctcaaactcgcagccctttgtcacggggaagattctatcacaattccctatcagggatcagggaaaggtgtcagcttccagctcgtcaagctaggtgtctggaaatccccaaccgacatgcaatcctgggtccccttatcaacggatgatccagtgatagacaggctttacctctcatctcacagaggtgttatcgctgacaatcaagcaaaatgggctgtcccgacaacacgaacagatgacaagttgcgaatggagacatgcttccaacaggcgtgtaagggtaaaatccaagcactctgcgagaatcccgagtgggcaccattgaaggataacaggattccttcatacggggtcttgtctgttgatctgagtctgacagttgagcttaaaatcaaaattgcttcgggattcgggccattgatcacacacggttcagggatggacctatacaaatccaaccacaacaatgtgtattggctgactatcccgccaatgaagaacctagccttaggtgtaatcaacacattggagtggataccgagattcaaggttagtccctacctcttcactgtcccaattaaggaagcaggcgaagactgccatgccccaacatacctacctgcggaggtggatggtgatgtcaaactcagttccaatctggtgattctacctggtcaagatctccaatatgttttggcaacctacgatacttccagggttgaacatgctgtggtttattacgtttacagcccaagccgctcattttcttacttttatccttttaggttgcctataaagggggtccccatcgaattacaagtggaatgcttcacatgggaccaaaaactctggtgccgtcacttctgtgtgcttgcggactcagaatctggtggacatatcactcactctgggatggtgggcatgggagtcagctgcacagtcacccgggaagatggaaccaatcgcagatagggctgctagtgaaccaatcacatgatgtcacccagacatcaggcatacccactagtctaccctccatcattgttataaaaaacttaggaaccaggtccacacagccgccagcccatcaacgcgtacggccaccatgggtagacttacaagtggggtgggaactgccgcacttttggttgttgctgtgggcttgcgagtggtttgcgctaaatacgcactcgccgatccgtccctcaaaatggcagaccccaatcggtttcggggcaagaatttgccagtccttgaccagctgacagaccctccaggggttaagagagtgtatcacatccagccctcccttgaggaccccttccaacccccatctataccgatcaccgtgtattacgccgtgctcgaacgcgcttgcaggtctgtgttgctgcacgcaccatctgaggctccccagattgttagaggggcaagcgacgaagcgagaaagcacacttacaacctcaccatagcttggtaccgcatgggcgacaactgcgccatcccaatcactgttatggaatatactgagtgcccttacaataaatctctgggtgtgtgtcctattaggacacagcctcgctggagctactatgactccttctctgccgtgagtgaagataatttgggtttcctgatgcacgcacccgcctttgagacagcaggtacgtaccttaggcttgtaaaaatcaacgattggaccgagataacccagtttattctggagcacagggctagagcatcctgtaaatacgcgttgccactccggataccaccagccgcttgcttgacctccaaggcttatcaacagggcgtaacggtggattccatcggcatgctccctaggttcatccctgaaaatcaaagaacggtggcactgtattcactcaagattgccggctggcacggccctaagccaccatacacctctactctgctgcccccggagctgagtgataccactaacgcaacccagcctgaactggtgccagaggatcctgaagattctgcattgctggaagacccagccggcactgtgtctagtcaaattccccctaattggcacataccgagcattcaggacgttgctccacaccacgctccggctgctccaagcaatcctggcctgataataggtgcattggccggttctaccctcgccgtcctggtgattgggggtatcgccttctgggttaggaggagagctcaaatggcccccaagcgcttgaggttgccgcacataagagacgacgacgcccccccttctcaccagcctctgttttattagttcgaactacagctcaacttacctgccaaccccatgccagtcgacccaactagtacaacctaaatccattataaaaaacttaggaaccaggtccacacagccgccagcccatcaaccatccactcccacgattggaggccggccatgaggggaggaggccttgtctgtgcacttgttgtaggagctttggtcgccgccgtagctagtgcagctccagcagcaccaagggcttcaggaggggttgcagctactgttgctgctaacggaggacctgctagccaaccacctccggtgccttctccggctactaccaaagcccgcaagcgaaaaacaaagaagcccccaaagaggccagaggccacacctccacccgacgctaacgctactgtggcggctggacacgctactttgagagcccacctgcgggaaatcaaggttgagaacgcagacgcacaattctacgtttgtcccccccctacaggtgcaacagtcgtgcagtttgagcagccaagacgctgtcctactaggcctgagggacaaaattacaccgagggtatcgccgtagtttttaaggagaatatcgcaccctataagtttaaagcgacaatgtactataaggatgtgaccgtcagccaagtctggtttggtcaccgatacagtcagtttatgggaatctttgaggaccgggccccggtccctttcgaagaagtgatcgacaagattaacgccaagggagtgtgcaggtcaaccgcaaagtacgtccgaaacaatatggaaacaaccgccttccacagggacgacacgaaacagatatggagcttaagccggctaaagtggccactcgcacgtcaagaggttggcataccacggacctgaaatataacccttctagagttgaagctttccaccggtatgggaccacggtgaactgtattgtggaagaagtggacgccagatccgtgtacccctacgacgaattcgttcttgctacaggcgatttcgtgtatatgtctcctttctacggctacagggagggctcccacaccgagcacacctcctacgccgcagatagatttaaacaggtggacggcttctacgctcgcgatctgactactaaggcacgggcaacaagcccaacaactcgcaatttgctgaccacaccaaagtttactgtggcctgggactgggtacccaagaggcctgctgtttgcacaatgaccaaatggcaggaggttgacgagatgctccgggccgaatatggaggatcctttagattctcttctgacgctatcagtaccaccttcaccacaaatctgactcagtactctctgtctcgcgtagatctgggagactgtatcggtagggacgcacgcgaggctatagatcggatgttcgcccggaaatacaacgccacccacattaaagtggggcagccccagtattacttggctactgggggcttccttatcgcttatcagcctctgctctcaaataccctggcggagctttatgtacgcgagtatatgagggagcaggacaggaagccacgcaacgctaccccagcacccctgagagaagcgccttctgccaacgcgagtgtggaacgaattaagaccacgtcttcaatcgaattcgctcggctccaatttacctacaaccacattcaacgccacgttaacgatatgctgggaaggattgcagttgcttggtgtgagctccagaaccacgaactgacactgtggaacgaggccagaaagcttaacccaaacgctattgcttccgcgacagttggaagaagagtgtctgcacgaatgctcggcgacgttatggctgttagtacctgtgtgcctgtggcccctgacaatgtaattgttcagaacagtatgagagtctcttctagacccggcacttgctactccaggccactggtctcttttcgctacgaggatcaggggcctttgatcgagggccagttgggagagaataacgaactgcgcctgaccagagacgctctggaaccctgtacagtcggccacagacgatattttatattcggcggcggttacgtatattttgaagagtatgcgtactcccaccaactgtccagagcagatgtgaccactgtgagcacttttatcgatctcaatatcactatgctggaggatcacgagtttgttccgttggaagtgtacactcggcacgagatcaaggacagtggcctgctcgattataccgaagtccagaggcgcaatcaactgcacgatctgagatttgccgatattgacacagtgattagggctgacgctaacgccgctatgtttgctggcctgtgtgcctttttcgagggaatgggtgatctcggaagagccgtaggcaaggtggttatgggagtcgtaggtggcgtcgttagtgccgtgtcaggggtgtctagctttatgtctaaccccttcggagctttggctgtgggtctcctggtacttgccggactggtggccgcattttttgcctttaggtacgtcctgcagctgcagaggaatccaatgaaggccctgtatccacttacaacaaaggaacttaaaacctccgatcctggaggagttggaggagaaggcgaagagggagcggaaggtggtgggtttgacgaggccaagttggctgaggcccgagagatgataaggtatatggctctcgtatctgcaatggagagaactgagcacaaagctcgcaagaagggaaccagtgccctgctgagcagcaaagtgacaaatatgtaatgactattcgaactactcagctagtctacgcgccgtagcctaccctccatcattgttataaaaaacttaggagcaaagtccacacagccgccgataaggtccacaatggcattgggtagagttggtttggctgtgggactttggggtctcctctgggtcggtgtggttgtcgtactggctaacgcttctccaggccgcactattactgttggaccgagagggaacgcttccaacgctgctccctctgcctcccctaggaacgcttctgctcctagaactacacctactccaccgcaaccccgcaaagcaaccaaaagcaaggcctcaaccgctaaaccagctcctccaccgaagacaggcccacctaaaaccagcagcgagcccgtgcggtgtaatcgacacgatcccctggcccgatacggtagtcgggtgcaaatccgctgtaggtttcctaatagtactagaacagaaagcaggctgcagatctggagatacgccactgccactgacgcagaaatcgggaccgccccttcccttgaggaggtgatggtgaacgtaagcgctccaccaggaggtcagctcgtctacgactcagcacccaataggaccgatccacacgtgatttgggcagaaggagctggaccaggcgcctctccaaggttgtattccgttgtaggcccactgggtcggcagagactgattatcgaagaactgactctggaaacccagggaatgtactattgggtttggggaaggactgataggcctagtgcttacggtacttgggtgagagtcagggtatttcggcctccttccctgactatacacccacacgcagtgctcgagggtcagcctttcaaggccacttgcacagccgcaacttactaccctgggaaccgagcagagtttgtgtggtttgaagacgggcggagagtttttgaccccgcacagatccacacgcagacccaggaaaaccctgacggattctccaccgttagcactgtgacctctgccgcagttggaggacaaggaccgccaaggaccttcacctgtcagctgacctggcaccgcgactctgtttcagcgtctagacggaacgcgagcggtactgcctctgtgctccccagacccacaatcacaatggagttcaccggcgatcacgccgtgtgtacggctggttgtgtacccgaaggcgtgacctttgcttggtttttgggagacgatagctcacctgccgagaaagtcgcagtggcttcacaaacttcctgcggaaggcccgggactgccactatccgatctacgctccccgtgtcttacgagcagacagaatatatttgccgactggcaggatatccagacggaatacccgtcctggaacaccacggttctcaccagcctccaccgagagatccaaccgagcgacaggtaatcagagccgtggaaggagcgggtattggcgtggcagttctcgttgctgtcgtacttgccggcacggctgttgtgtatctcactcacgccagcagcgtgcgatacaggcgcctcagatgataagcgcgcagcgcttagacgtctcgcgatcgatgctagtgtgaaatagacatcagaattaagaaaaacgtagggtccaagtggttccccgttatggactcgctatctgtcaaccagatcttataccctgaagttcacctagatagcccgatagttaccaataagatagtagccatcctggagtatgctcgagtccctcacgcttacagcctggaggaccctacactgtgtcagaacatcaagcaccgcctaaaaaacggattttccaaccaaatgattataaacaatgtggaagttgggaatgtcatcaagtccaagcttaggagttatccggcccactctcatattccatatccaaattgtaatcaggatttatttaacatagaagacaaagagtcaacgaggaagatccgtgaactcctcaaaaaggggaattcgctgtactccaaagtcagtgataaggttttccaatgcttaagggacactaactcacggcttggcctaggctccgaattgagggaggacatcaaggagaaagttattaacttgggagtttacatgcacagctcccagtggtttgagccctttctgttttggtttacagtcaagactgagatgaggtcagtgattaaatcacaaacccatacttgccataggaggagacacacacctgtattcttcactggtagttcagttgagttgctaatctctcgtgaccttgttgctataatcagtaaagagtctcaacatgtatattacctgacatttgaactggttttgatgtattgtgatgtcatagaggggaggttaatgacagagaccgctatgactattgatgctaggtatacagagcttctaggaagagtcagatacatgtggaaactgatagatggtttcttccctgcactcgggaatccaacttatcaaattgtagccatgctggagcctctttcacttgcttacctgcagctgagggatataacagtagaactcagaggtgctttccttaaccactgctttactgaaatacatgatgttcttgaccaaaacgggttttctgatgaaggtacttatcatgagttaactgaagctctagattacattttcataactgatgacatacatctgacaggggagattttctcatttttcagaagtttcggccaccccagacttgaagcagtaacggctgctgaaaatgttaggaaatacatgaatcagcctaaagtcattgtgtatgagactctgatgaaaggtcatgccatattttgtggaatcataatcaacggctatcgtgacaggcacggaggcagttggccaccgctgaccctccccctgcatgctgcagacacaatccggaatgctcaagcttcaggtgaagggttaacacatgagcagtgcgttgataactggaaatcttttgctggagtgaaatttggctgctttatgcctcttagcctggatagtgatctgacaatgtacctaaaggacaaggcacttgctgctctccaaagggaatgggattcagtttacccgaaagagttcctgcgttacgaccctcccaagggaaccgggtcacggaggcttgtagatgttttccttaatgattcgagctttgacccatatgatgtgataatgtatgttgtaagtggagcttacctccatgaccctgagttcaacctgtcttacagcctgaaagaaaaggagatcaaggaaacaggtagactttttgctaaaatgacttacaaaatgagggcatgccaagtgattgctgaaaatctaatctcaaacgggattggcaaatattttaaggacaatgggatggccaaggatgagcacgatttgactaaggcactccacactctagctgtctcaggagtccccaaagatctcaaagaaagtcacaggggggggccagtcttaaaaacctactcccgaagcccagtccacacaagtaccaggaacgtgagagcagcaaaagggtttatagggttccctcaagtaattcggcaggaccaagacactgatcatccggagaatatggaagcttacgagacagtcagtgcatttatcacgactgatctcaagaagtactgccttaattggagatatgagaccatcagcttgtttgcacagaggctaaatgagatttacggattgccctcatttttccagtggctgcataagaggcttgagacctctgtcctgtatgtaagtgaccctcattgcccccccgaccttgacgcccatatcccgttatataaagtccccaatgatcaaatcttcattaagtaccctatgggaggtatagaagggtattgtcagaagctgtggaccatcagcaccattccctatctatacctggctgcttatgagagcggagtaaggattgcttcgttagtgcaaggggacaatcagaccatagccgtaacaaaaagggtacccagcacatggccctacaaccttaagaaacgggaagctgctagagtaactagagattactttgtaattcttaggcaaaggctacatgatattggccatcacctcaaggcaaatgagacaattgtttcatcacatttttttgtctattcaaaaggaatatattatgatgggctacttgtgtcccaatcactcaagagcatcgcaagatgtgtattctggtcagagactatagttgatgaaacaagggcagcatgcagtaatattgctacaacaatggctaaaagcatcgagagaggttatgaccgttaccttgcatattccctgaacgtcctaaaagtgatacagcaaattctgatctctcttggcttcacaatcaattcaaccatgacccgggatgtagtcatacccctcctcacaaacaacgacctcttaataaggatggcactgttgcccgctcctattggggggatgaattatctgaatatgagcaggctgtttgtcagaaacatcggtgatccagtaacatcatcaattgctgatctcaagagaatgattctcgcctcactaatgcctgaagagaccctccatcaagtaatgacacaacaaccgggggactcttcattcctagactgggctagcgacccttactcagcaaatcttgtatgtgtccagagcatcactagactcctcaagaacataactgcaaggtttgtcctgatccatagtccaaacccaatgttaaaaggattattccatgatgacagtaaagaagaggacgagggactggcggcattcctcatggacaggcatattatagtacctagggcagctcatgaaatcctggatcatagtgtcacaggggcaagagagtctattgcaggcatgctggataccacaaaaggcttgattcgagccagcatgaggaagggggggttaacctctcgagtgataaccagattgtccaattatgactatgaacaattcagagcagggatggtgctattgacaggaagaaagagaaatgtcctcattgacaaagagtcatgttcagtgcagctggcgagagctctaagaagccatatgtgggcgaggctagctcgaggacggcctatttacggccttgaggtccctgatgtactagaatctatgcgaggccaccttattcggcgtcatgagacatgtgtcatctgcgagtgtggatcagtcaactacggatggttttttgtcccctcgggttgccaactggatgatattgacaaggaaacatcatccttgagagtcccatatattggttctaccactgatgagagaacagacatgaagcttgccttcgtaagagccccaagtcgatccttgcgatctgctgttagaatagcaacagtgtactcatgggcttacggtgatgatgatagctcttggaacgaagcctggttgttggctaggcaaagggccaatgtgagcctggaggagctaagggtgatcactcccatctcaacttcgactaatttagcgcataggttgagggatcgtagcactcaagtgaaatactcaggtacatcccttgtccgagtggcgaggtataccacaatctccaacgacaatctctcatttgtcatatcagataagaaggttgatactaactttatataccaacaaggaatgcttctagggttgggtgttttagaaacattgtttcgactcgagaaagataccggatcatctaacacggtattacatcttcacgtcgaaacagattgttgcgtgatcccgatgatagatcatcccaggatacccagctcccgcaagctagagctgagggcagagctatgtaccaacccattgatatatgataatgcacctttaattgacagagatgcaacaaggctatacacccagagccataggaggcaccttgtggaatttgttacatggtccacaccccaactatatcacattttagctaagtccacagcactatctatgattgacctggtaacaaaatttgagaaggaccatatgaatgaaatttcagctctcataggggatgacgatatcaatagtttcataactgagtttctgctcatagagccaagattattcactatctacttgggccagtgtgcggccatcaattgggcatttgatgtacattatcatagaccatcagggaaatatcagatgggtgagctgttgtcatcgttcctttctagaatgagcaaaggagtgtttaaggtgcttgtcaatgctctaagccacccaaagatctacaagaaattctggcattgtggtattatagagcctatccatggtccttcacttgatgctcaaaacttgcacacaactgtgtgcaacatggtttacacatgctatatgacctacctcgacctgttgttgaatgaagagttagaagagttcacatttctcttgtgtgaaagcgacgaggatgtagtaccggacagattcgacaacatccaggcaaaacacttatgtgttctggcagatttgtactgtcaaccagggacctgcccaccaattcgaggtctaagaccggtagagaaatgtgcagttctaaccgaccatatcaaggcagaggctatgttatctccagcaggatcttcgtggaacataaatccaattattgtagaccattactcatgctctctgacttatctccggcgaggatcgatcaaacagataagattgagagttgatccaggattcattttcgacgccctcgctgaggtaaatgtcagtcagccaaagatcggcagcaacaacatctcaaatatgagcatcaaggctttcagacccccacacgatgatgttgcaaaattgctcaaagatatcaacacaagcaagcacaatcttcccatttcagggggcaatctcgccaattatgaaatccatgctttccgcagaatcgggttgaactcatctgcttgctacaaagctgttgagatatcaacattaattaggagatgccttgagccaggggaggacggcttgttcttgggtgagggatcgggttctatgttgatcacttataaagagatacttaaactaaacaagtgcttctataatagtggggtttccgccaattctagatctggtcaaagggaattagcaccctatccctccgaagttggccttgtcgaacacagaatgggagtaggtaatattgtcaaagtgctctttaacgggaggcccgaagtcacgtgggtaggcagtgtagattgcttcaatttcatagttagtaatatccctacctctagtgtggggtttatccattcagatatagagaccttgcctgacaaagatactatagagaagctagaggaattggcagccatcttatcgatggctctgctcctgggcaaaataggatcaatactggtgattaagcttatgcctttcagcggggattttgttcagggatttataagttatgtagggtctcattatagagaagtgaaccttgtataccctagatacagcaacttcatctctactgaatcttatttggttatgacagatctcaaggctaaccggctaatgaatcctgaaaagattaagcagcagataattgaatcatctgtgaggacttcacctggacttataggtcacatcctatccattaagcaactaagctgcatacaagcaattgtgggagacgcagttagtagaggtgatatcaatcctactctgaaaaaacttacacctatagagcaggtgctgatcaattgcgggttggcaattaacggacctaagctgtgcaaagaattgatccaccatgatgttgcctcagggcaagatggattgcttaattctatactcatcctctacagggagttggcaagattcaaagacaaccaaagaagtcaacaagggatgttccacgcttaccccgtattggtaagtagcaggcaacgagaacttatatctaggatcacccgcaaattctgggggcacattcttctttactccgggaacaaaaagttgataaataagtttatccagaatctcaagtccggctatctgatactagacttacaccagaatatcttcgttaagaatctatccaagtcagagaaacagattattatgacggggggtttgaaacgtgagtgggtttttaaggtaacagtcaaggagaccaaagaatggtataagttagtcggatacagtgccctgattaaggactaattggttgaactccggaaccctaatcctgccctaggtggttaggcattatttgcaatatattaaagaaaactttgaaaatacgaagtttctattcccagctttgtctggt

SEQ ID NO: 77 - DNA, 25 bp, synthetic construct
  source 1..25: mol_type = other DNA
cgaagactgccatgccccaacatac

SEQ ID NO: 78 - DNA, 25 bp, synthetic construct
  source 1..25: mol_type = other DNA
tagcgagtccataacggggaaccac

SEQ ID NO: 79 - DNA, 21588 bp, synthetic construct
  source 1..21588: mol_type = other DNA
accaaacaaagttgggtaaggatagttcaatcaatgatcatcttctagtgcacttaggattcaagatcctattatcagggacaagagcaggattagggatatccgagatggccacacttttaaggagcttagcattgttcaaaagaaacaaggacaaaccacccattacatcaggatccggtggagccatcagaggaatcaaacacattattatagtaccaatccctggagattcctcaattaccactcgatccagacttctggaccggttggtgaggttaattggaaacccggatgtgagcgggcccaaactaacaggggcactaataggtatattatccttatttgtggagtctccaggtcaattgattcagaggatcaccgatgaccctgacgttagcataaggctgttagaggttgtccagagtgaccagtcacaatctggccttaccttcgcatcaagaggtaccaacatggaggatgaggcggaccaatacttttcacatgatgatccaattagtagtgatcaatccaggttcggatggttcgggaacaaggaaatctcagatattgaagtgcaagaccctgagggattcaacatgattctgggtaccatcctagcccaaatttgggtcttgctcgcaaaggcggttacggccccagacacggcagctgattcggagctaagaaggtggataaagtacacccaacaaagaagggtagttggtgaatttagattggagagaaaatggttggatgtggtgaggaacaggattgccgaggacctctccttacgccgattcatggtcgctctaatcctggatatcaagagaacacccggaaacaaacccaggattgctgaaatgatatgtgacattgatacatatatcgtagaggcaggattagccagttttatcctgactattaagtttgggatagaaactatgtatcctgctcttggactgcatgaatttgctggtgagttatccacacttgagtccttgatgaacctttaccagcaaatgggggaaactgcaccctacatggtaatcctggagaactcaattcagaacaagttcagtgcaggatcataccctctgctctggagctatgccatgggagtaggagtggaacttgaaaactccatgggaggtttgaactttggccgatcttactttgatccagcatattttagattagggcaagagatggtaaggaggtcagctggaaaggtcagttccacattggcatctgaactcggtatcactgccgaggatgcaaggcttgtttcagagattgcaatgcatactactgaggacaagatcagtagagcggttggacccagacaagcccaagtatcatttctacacggtgatcaaagtgagaatgagctaccgagattggggggcaaggaagataggagggtcaaacagagtcgaggagaagccagggagagctacagagaaaccgggcccagcagagcaagtgatgcgagagctgcccatcttccaaccggcacacccctagacattgacactgcaacggagtccagccaagatccgcaggacagtcgaaggtcagctgacgccctgcttaggctgcaagccatggcaggaatctcggaagaacaaggctcagacacggacacccctatagtgtacaatgacagaaatcttctagactaggtgcgagaggccgagggccagaacaacatccgcctaccatccatcattgttataaaaaacttaggaaccaggtccacacagccgccagcccatcaaccatccactcccacgattggagccaatggcagaagagcaggcacgccatgtcaaaaacggactggaatgcatccgggctctcaaggccgagcccatcggctcactggccatcgaggaagctatggcagcatggtcagaaatatcagacaacccaggacaggagcgagccacctgcagggaagagaaggcaggcagttcgggtctcagcaaaccatgcctctcagcaattggatcaactgaaggcggtgcacctcgcatccgcggtcagggacctggagagagcgatgacgacgctgaaactttgggaatccccccaagaaatctccaggcatcaagcactgggttacagtgttattacgtttatgatcacagcggtgaagcggttaagggaatccaagatgctgactctatcatggttcaatcaggccttgatggtgatagcaccctctcaggaggagacaatgaatctgaaaacagcgatgtggatattggcgaacctgataccgagggatatgctatcactgaccggggatctgctcccatctctatggggttcagggcttctgatgttgaaactgcagaaggaggggagatccacgagctcctgagactccaatccagaggcaacaactttccgaagcttgggaaaactctcaatgttcctccgcccccggaccccggtagggccagcacttccgggacacccattaaaaagggcacagacgcgagattagcctcatttggaacggagatcgcgtctttattgacaggtggtgcaacccaatgtgctcgaaagtcaccctcggaaccatcagggccaggtgcacctgcggggaatgtccccgagtgtgtgagcaatgccgcactgatacaggagtggacacccgaatctggtaccacaatctccccgagatcccagaataatgaagaagggggagactattatgatgatgagctgttctctgatgtccaagatattaaaacagccttggccaaaatacacgaggataatcagaagataatctccaagctagaatcactgctgttattgaagggagaagttgagtcaattaagaagcagatcaacaggcaaaatatcagcatatccaccctggaaggacacctctcaagcatcatgatcgccattcctggacttgggaaggatcccaacgaccccactgcagatgtcgaaatcaatcccgacttgaaacccatcataggcagagattcaggccgagcactggccgaagttctcaagaaacccgttgccagccgacaactccaaggaatgacaaatggacggaccagttccagaggacagctgctgaaggaatttcagctaaagccgatcgggaaaaagatgagctcagccgtcgggtttgttcctgacaccggccctgcatcacgcagtgtaatccgctccattataaaatccagccggctagaggaggatcggaagcgttacctgatgactctccttgatgatatcaaaggagccaatgatcttgccaagttccaccagatgctgatgaagataataatgaagtagctacagctcaacttacctgccaaccccatgccagtcgacccaactagcctaccctccatcattgttataaaaaacttaggaaccaggtccacacagccgccagcccatcaacgcgtacggccaccatgggtagacttacaagtggggtgggaactgccgcacttttggttgttgctgtgggcttgcgagtggtttgcgctaaatacgcactcgccgatccgtccctcaaaatggcagaccccaatcggtttcggggcaagaatttgccagtccttgaccagctgacagaccctccaggggttaagagagtgtatcacatccagccctcccttgaggaccccttccaacccccatctataccgatcaccgtgtattacgccgtgctcgaacgcgcttgcaggtctgtgttgctgcacgcaccatctgaggctccccagattgttagaggggcaagcgacgaagcgagaaagcacacttacaacctcaccatagcttggtaccgcatgggcgacaactgcgccatcccaatcactgttatggaatatactgagtgcccttacaataaatctctgggtgtgtgtcctattaggacacagcctcgctggagctactatgactccttctctgccgtgagtgaagataatttgggtttcctgatgcacgcacccgcctttgagacagcaggtacgtaccttaggcttgtaaaaatcaacgattggaccgagataacccagtttattctggagcacagggctagagcatcctgtaaatacgcgttgccactccggataccaccagccgcttgcttgacctccaaggcttatcaacagggcgtaacggtggattccatcggcatgctccctaggttcatccctgaaaatcaaagaacggtggcactgtattcactcaagattgccggctggcacggccctaagccaccatacacctctactctgctgcccccggagctgagtgataccactaacgcaacccagcctgaactggtgccagaggatcctgaagattctgcattgctggaagacccagccggcactgtgtctagtcaaattccccctaattggcacataccgagcattcaggacgttgctccacaccacgctccggctgctccaagcaatcctggcctgataataggtgcattggccggttctaccctcgccgtcctggtgattgggggtatcgccttctgggttaggaggagagctcaaatggcccccaagcgcttgaggttgccgcacataagagacgacgacgcccccccttctcaccagcctctgttttattagttcgaactacagctcaacttacctgccaaccccatgccagtcgacccaactagtacaacctaaatccattataaaaaacttaggaaccaggtccacacagccgccagcccatcaaccatccactcccacgattggaggccggccatgaggggaggaggccttgtctgtgcacttgttgtaggagctttggtcgccgccgtagctagtgcagctccagcagcaccaagggcttcaggaggggttgcagctactgttgctgctaacggaggacctgctagccaaccacctccggtgccttctccggctactaccaaagcccgcaagcgaaaaacaaagaagcccccaaagaggccagaggccacacctccacccgacgctaacgctactgtggcggctggacacgctactttgagagcccacctgcgggaaatcaaggttgagaacgcagacgcacaattctacgtttgtcccccccctacaggtgcaacagtcgtgcagtttgagcagccaagacgctgtcctactaggcctgagggacaaaattacaccgagggtatcgccgtagtttttaaggagaatatcgcaccctataagtttaaagcgacaatgtactataaggatgtgaccgtcagccaagtctggtttggtcaccgatacagtcagtttatgggaatctttgaggaccgggccccggtccctttcgaagaagtgatcgacaagattaacgccaagggagtgtgcaggtcaaccgcaaagtacgtccgaaacaatatggaaacaaccgccttccacagggacgaccacgaaacagatatggagcttaagccggctaaagtggccactcgcacgtcaagaggttggcataccacggacctgaaatataacccttctagagttgaagctttccaccggtatgggaccacggtgaactgtattgtggaagaagtggacgccagatccgtgtacccctacgacgaattcgttcttgctacaggcgatttcgtgtatatgtctcctttctacggctacagggagggctcccacaccgagcacacctcctacgccgcagatagatttaaacaggtggacggcttctacgctcgcgatctgactactaaggcacgggcaacaagcccaacaactcgcaatttgctgaccacaccaaagtttactgtggcctgggactgggtacccaagaggcctgctgtttgcacaatgaccaaatggcaggaggttgacgagatgctccgggccgaatatggaggatcctttagattctcttctgacgctatcagtaccaccttcaccacaaatctgactcagtactctctgtctcgcgtagatctgggagactgtatcggtagggacgcacgcgaggctatagatcggatgttcgcccggaaatacaacgccacccacattaaagtggggcagccccagtattacttggctactgggggcttccttatcgcttatcagcctctgctctcaaataccctggcggagctttatgtacgcgagtatatgagggagcaggacaggaagccacgcaacgctaccccagcacccctgagagaagcgccttctgccaacgcgagtgtggaacgaattaagaccacgtcttcaatcgaattcgctcggctccaatttacctacaaccacattcaacgccacgttaacgatatgctgggaaggattgcagttgcttggtgtgagctccagaaccacgaactgacactgtggaacgaggccagaaagcttaacccaaacgctattgcttccgcgacagttggaagaagagtgtctgcacgaatgctcggcgacgttatggctgttagtacctgtgtgcctgtggcccctgacaatgtaattgttcagaacagtatgagagtctcttctagacccggcacttgctactccaggccactggtctcttttcgctacgaggatcaggggcctttgatcgagggccagttgggagagaataacgaactgcgcctgaccagagacgctctggaaccctgtacagtcggccacagacgatattttatattcggcggcggttacgtatattttgaagagtatgcgtactcccaccaactgtccagagcagatgtgaccactgtgagcacttttatcgatctcaatatcactatgctggaggatcacgagtttgttccgttggaagtgtacactcggcacgagatcaaggacagtggcctgctcgattataccgaagtccagaggcgcaatcaactgcacgatctgagatttgccgatattgacacagtgattagggctgacgctaacgccgctatgtttgctggcctgtgtgcctttttcgagggaatgggtgatctcggaagagccgtaggcaaggtggttatgggagtcgtaggtggcgtcgttagtgccgtgtcaggggtgtctagctttatgtctaaccccttcggagctttggctgtgggtctcctggtacttgccggactggtggccgcattttttgcctttaggtacgtcctgcagctgcagaggaatccaatgaaggccctgtatccacttacaacaaaggaacttaaaacctccgatcctggaggagttggaggagaaggcgaagagggagcggaaggtggtgggtttgacgaggccaagttggctgaggcccgagagatgataaggtatatggctctcgtatctgcaatggagagaactgagcacaaagctcgcaagaagggaaccagtgccctgctgagcagcaaagtgacaaatatggtgcttcgaaaacgcaataaggctcgctactctcctctgcacaacgaggacgaagcaggggatgaggacgaactctgactattcgaactactcagctagtctacgcgccgtagcctaccctccatcattgttataaaaaacttaggagcaaagtccacacagccgccgataaggtccacaatggcattgggtagagttggtttggctgtgggactttggggtctcctctgggtcggtgtggttgtcgtactggctaacgcttctccaggccgcactattactgttggaccgagagggaacgcttccaacgctgctccctctgcctcccctaggaacgcttctgctcctagaactacacctactccaccgcaaccccgcaaagcaaccaaaagcaaggcctcaaccgctaaaccagctcctccaccgaagacaggcccacctaaaaccagcagcgagcccgtgcggtgtaatcgacacgatcccctggcccgatacggtagtcgggtgcaaatccgctgtaggtttcctaatagtactagaacagaaagcaggctgcagatctggagatacgccactgccactgacgcagaaatcgggaccgccccttcccttgaggaggtgatggtgaacgtaagcgctccaccaggaggtcagctcgtctacgactcagcacccaataggaccgatccacacgtgatttgggcagaaggagctggaccaggcgcctctccaaggttgtattccgttgtaggcccactgggtcggcagagactgattatcgaagaactgactctggaaacccagggaatgtactattgggtttggggaaggactgataggcctagtgcttacggtacttgggtgagagtcagggtatttcggcctccttccctgactatacacccacacgcagtgctcgagggtcagcctttcaaggccacttgcacagccgcaacttactaccctgggaaccgagcagagtttgtgtggtttgaagacgggcggagagtttttgaccccgcacagatccacacgcagacccaggaaaaccctgacggattctccaccgttagcactgtgacctctgccgcagttggaggacaaggaccgccaaggaccttcacctgtcagctgacctggcaccgcgactctgtttcagcgtctagacggaacgcgagcggtactgcctctgtgctccccagacccacaatcacaatggagttcaccggcgatcacgccgtgtgtacggctggttgtgtacccgaaggcgtgacctttgcttggtttttgggagacgatagctcacctgccgagaaagtcgcagtggcttcacaaacttcctgcggaaggcccgggactgccactatccgatctacgctccccgtgtcttacgagcagacagaatatatttgccgactggcaggatatccagacggaatacccgtcctggaacaccacggttctcaccagcctccaccgagagatccaaccgagcgacaggtaatcagagccgtggaaggagcgggtattggcgtggcagttctcgttgctgtcgtacttgccggcacggctgttgtgtatctcactcacgccagcagcgtgcgatacaggcgcctcagatgataagcgcgcagcgcttagacgtctcgcgatcgatactagtacaacctaaatccattataaaaaacttaggagcaaagtgattgcctcccaaggtccacaatgacagagacctacgacttcgacaagtcggcatgggacatcaaagggtcgatcgctccgatacaacccaccacctacagtgatggcaggctggtgccccaggtcagagtcatagatcctggtctaggcgacaggaaggatgaatgctttatgtacatgtttctgctgggggttgttgaggacagcgattccctagggcctccaatcgggcgagcatttgggttcctgcccttaggtgttggcagatccacagcaaagcccgaaaaactcctcaaagaggccactgagcttgacatagttgttagacgtacagcagggctcaatgaaaaactggtgttctacaacaacaccccactaactctcctcacaccttggagaaaggtcctaacaacagggagtgtcttcaacgcaaaccaagtgtgcaatgcggttaatctgataccgctcgataccccgcagaggttccgtgttgtttatatgagcatcacccgtctttcggataacgggtattacaccgttcctagaagaatgctggaattcagatcggtcaatgcagtggccttcaacctgctggtgacccttaggattgacaaggcgataggccctgggaagatcatcgacaatacagagcaacttcctgaggcaacatttatggtccacatcgggaacttcaggagaaagaagagtgaagtctactctgccgattattgcaaaatgaaaatcgaaaagatgggcctggtttttgcacttggtgggatagggggcaccagtcttcacattagaagcacaggcaaaatgagcaagactctccatgcacaactcgggttcaagaagaccttatgttacccgctgatggatatcaatgaagaccttaatcgattactctggaggagcagatgcaagatagtaagaatccaggcagttttgcagccatcagttcctcaagaattccgcatttacgacgacgtgatcataaatgatgaccaaggactattcaaagttctgtagaccgtagtgcccagcaatgcccgaaaacgacccccctcacaatgacagccagaaggcccggacaaaaaagccccctccgaaagactccacggaccaagcgagaggccagccagcagccgacggcaagcgcgaacaccaggcggccccagcacagaacagccctgacacaaggccaccaccagccaccccaatctgcatcctcctcgtgggacccccgaggaccaacccccaaggctgcccccgatccaaaccaccaaccgcatccccaccacccccgggaaagaaacccccagcaattggaaggcccctccccctcttcctcaacacaagaactccacaaccgaaccgcacaagcgaccgaggtgacccaaccgcaggcatccgactccctagacagatcctctctccccggcaaactaaacaaaacttagggccaaggaacatacacacccaacagaacccagaccccggcccacggcgccgcgcccccaacccccgacaaccagagggagcccccaaccaatcccgccggctcccccggtgcccacaggcagggacaccaacccccgaacagacccagcacccaaccatcgacaatccaagacgggggggcccccccaaaaaaaggcccccaggggccgacagccagcaccgcgaggaagcccacccaccccacacacgaccacggcaaccaaaccagaacccagaccaccctgggccaccagctcccagactcggccatcaccccgcagaaaggaaaggccacaacccgcgcaccccagccccgatccggcggggagccacccaacccgaaccagcacccaagagcgatccccgaaggacccccgaaccgcaaaggacatcagtatcccacagcctctccaagtcccccggtctcctcctcttctcgaagggaccaaaagatcaatccaccacacccgacgacactcaactccccacccctaaaggagacaccgggaatcccagaatcaagactcatccaatgtccatcatgggtctcaaggtgaacgtctctgccatattcatggcagtactgttaactctccaaacacccaccggtcaaatccattggggcaatctctctaagataggggtggtaggaataggaagtgcaagctacaaagttatgactcgttccagccatcaatcattagtcataaaattaatgcccaatataactctcctcaataactgcacgagggtagagattgcagaatacaggagactactgagaacagttttggaaccaattagagatgcacttaatgcaatgacccagaatataagaccggttcagagtgtagcttcaagtaggagacacaagagatttgcgggagtagtcctggcaggtgcggccctaggcgttgccacagctgctcagataacagccggcattgcacttcaccagtccatgctgaactctcaagccatcgacaatctgagagcgagcctggaaactactaatcaggcaattgagacaatcagacaagcagggcaggagatgatattggctgttcagggtgtccaagactacatcaataatgagctgataccgtctatgaaccaactatcttgtgatttaatcggccagaagctcgggctcaaattgctcagatactatacagaaatcctgtcattatttggccccagtttacgggaccccatatctgcggagatatctatccaggctttgagctatgcgcttggaggagacatcaataaggtgttagaaaagctcggatacagtggaggtgatttactgggcatcttagagagcggaggaataaaggcccggataactcacgtcgacacagagtcctacttcattgtcctcagtatagcctatccgacgctgtccgagattaagggggtgattgtccaccggctagagggggtctcgtacaacataggctctcaagagtggtataccactgtgcccaagtatgttgcaacccaagggtaccttatctcgaattttgatgagtcatcgtgtactttcatgccagaggggactgtgtgcagccaaaatgccttgtacccgatgagtcctctgctccaagaatgcctccgggggtacaccaagtcctgtgctcgtacactcgtatccgggtcttttgggaaccggttcattttatcacaagggaacctaatagccaattgtgcatcaatcctttgcaagtgttacacaacaggaacgatcattaatcaagaccctgacaagatcctaacatacattgctgccgatcactgcccggtagtcgaggtgaacggcgtgaccatccaagtcgggagcaggaggtatccagacgctgtgtacttgcacagaattgacctcggtcctcccatatcattggagaggttggacgtagggacaaatctggggaatgcaattgctaagttggaggatgccaaggaattgttggagtcatcggaccagatattgaggagtatgaaaggtttatcgagcactagcatagtctacatcctgattgcagtgtgtcttggagggttgatagggatccccgctttaatatgttgctgcagggggcgttgtaacaaaaagggagaacaagttggtatgtcaagaccaggcctaaagcctgatcttacgggaacatcaaaatcctatgtaaggtcgctctgatcctctacaactcttgaaacacaaatgtcccacaagtctcctcttcgtcatcaagcaaccaccgcacccagcatcaagcccacctgaaattatctccggcttccctctggccgaacaatatcggtagttaatcaaaacttagggtgcaagatcatccacaatgtcaccacaacgagaccggataaatgccttctacaaagataacccccatcccaagggaagtaggatagtcattaacagagaacatcttatgattgatagaccttatgttttgctggctgttctgtttgtcatgtttctgagcttgatcgggttgctagccattgcaggcattagacttcatcgggcagccatctacaccgcagagatccataaaagcctcagcaccaatctagatgtaactaactcaatcgagcatcaggtcaaggacgtgctgacaccactcttcaaaatcatcggtgatgaagtgggcctgaggacacctcagagattcactgacctagtgaaattaatctctgacaagattaaattccttaatccggatagggagtacgacttcagagatctcacttggtgtatcaacccgccagagagaatcaaattggattatgatcaatactgtgcagatgtggctgctgaagagctcatgaatgcattggtgaactcaactctactggagaccagaacaaccaatcagttcctagctgtctcaaagggaaactgctcagggcccactacaatcagaggtcaattctcaaacatgtcgctgtccctgttagacttgtatttaggtcgaggttacaatgtgtcatctatagtcactatgacatcccagggaatgtatgggggaacttacctagtggaaaagcctaatctgagcagcaaaaggtcagagttgtcacaactgagcatgtaccgagtgtttgaagtaggtgttatcagaaatccgggtttgggggctccggtgttccatatgacaaactatcttgagcaaccagtcagtaatgatctcagcaactgtatggtggctttgggggagctcaaactcgcagccctttgtcacggggaagattctatcacaattccctatcagggatcagggaaaggtgtcagcttccagctcgtcaagctaggtgtctggaaatccccaaccgacatgcaatcctgggtccccttatcaacggatgatccagtgatagacaggctttacctctcatctcacagaggtgttatcgctgacaatcaagcaaaatgggctgtcccgacaacacgaacagatgacaagttgcgaatggagacatgcttccaacaggcgtgtaagggtaaaatccaagcactctgcgagaatcccgagtgggcaccattgaaggataacaggattccttcatacggggtcttgtctgttgatctgagtctgacagttgagcttaaaatcaaaattgcttcgggattcgggccattgatcacacacggttcagggatggacctatacaaatccaaccacaacaatgtgtattggctgactatcccgccaatgaagaacctagccttaggtgtaatcaacacattggagtggataccgagattcaaggttagtccctacctcttcactgtcccaattaaggaagcaggcgaagactgccatgccccaacatacctacctgcggaggtggatggtgatgtcaaactcagttccaatctggtgattctacctggtcaagatctccaatatgttttggcaacctacgatacttccagggttgaacatgctgtggtttattacgtttacagcccaagccgctcattttcttacttttatccttttaggttgcctataaagggggtccccatcgaattacaagtggaatgcttcacatgggaccaaaaactctggtgccgtcacttctgtgtgcttgcggactcagaatctggtggacatatcactcactctgggatggtgggcatgggagtcagctgcacagtcacccgggaagatggaaccaatcgcagatagggctgctagtgaaccaatcacatgatgtcacccagacatcaggcatacccactagtgtgaaatagacatcagaattaagaaaaacgtagggtccaagtggttccccgttatggactcgctatctgtcaaccagatcttataccctgaagttcacctagatagcccgatagttaccaataagatagtagccatcctggagtatgctcgagtccctcacgcttacagcctggaggaccctacactgtgtcagaacatcaagcaccgcctaaaaaacggattttccaaccaaatgattataaacaatgtggaagttgggaatgtcatcaagtccaagcttaggagttatccggcccactctcatattccatatccaaattgtaatcaggatttatttaacatagaagacaaagagtcaacgaggaagatccgtgaactcctcaaaaaggggaattcgctgtactccaaagtcagtgataaggttttccaatgcttaagggacactaactcacggcttggcctaggctccgaattgagggaggacatcaaggagaaagttattaacttgggagtttacatgcacagctcccagtggtttgagccctttctgttttggtttacagtcaagactgagatgaggtcagtgattaaatcacaaacccatacttgccataggaggagacacacacctgtattcttcactggtagttcagttgagttgctaatctctcgtgaccttgttgctataatcagtaaagagtctcaacatgtatattacctgacatttgaactggttttgatgtattgtgatgtcatagaggggaggttaatgacagagaccgctatgactattgatgctaggtatacagagcttctaggaagagtcagatacatgtggaaactgatagatggtttcttccctgcactcgggaatccaacttatcaaattgtagccatgctggagcctctttcacttgcttacctgcagctgagggatataacagtagaactcagaggtgctttccttaaccactgctttactgaaatacatgatgttcttgaccaaaacgggttttctgatgaaggtacttatcatgagttaactgaagctctagattacattttcataactgatgacatacatctgacaggggagattttctcatttttcagaagtttcggccaccccagacttgaagcagtaacggctgctgaaaatgttaggaaatacatgaatcagcctaaagtcattgtgtatgagactctgatgaaaggtcatgccatattttgtggaatcataatcaacggctatcgtgacaggcacggaggcagttggccaccgctgaccctccccctgcatgctgcagacacaatccggaatgctcaagcttcaggtgaagggttaacacatgagcagtgcgttgataactggaaatcttttgctggagtgaaatttggctgctttatgcctcttagcctggatagtgatctgacaatgtacctaaaggacaaggcacttgctgctctccaaagggaatgggattcagtttacccgaaagagttcctgcgttacgaccctcccaagggaaccgggtcacggaggcttgtagatgttttccttaatgattcgagctttgacccatatgatgtgataatgtatgttgtaagtggagcttacctccatgaccctgagttcaacctgtcttacagcctgaaagaaaaggagatcaaggaaacaggtagactttttgctaaaatgacttacaaaatgagggcatgccaagtgattgctgaaaatctaatctcaaacgggattggcaaatattttaaggacaatgggatggccaaggatgagcacgatttgactaaggcactccacactctagctgtctcaggagtccccaaagatctcaaagaaagtcacaggggggggccagtcttaaaaacctactcccgaagcccagtccacacaagtaccaggaacgtgagagcagcaaaagggtttatagggttccctcaagtaattcggcaggaccaagacactgatcatccggagaatatggaagcttacgagacagtcagtgcatttatcacgactgatctcaagaagtactgccttaattggagatatgagaccatcagcttgtttgcacagaggctaaatgagatttacggattgccctcatttttccagtggctgcataagaggcttgagacctctgtcctgtatgtaagtgaccctcattgcccccccgaccttgacgcccatatcccgttatataaagtccccaatgatcaaatcttcattaagtaccctatgggaggtatagaagggtattgtcagaagctgtggaccatcagcaccattccctatctatacctggctgcttatgagagcggagtaaggattgcttcgttagtgcaaggggacaatcagaccatagccgtaacaaaaagggtacccagcacatggccctacaaccttaagaaacgggaagctgctagagtaactagagattactttgtaattcttaggcaaaggctacatgatattggccatcacctcaaggcaaatgagacaattgtttcatcacatttttttgtctattcaaaaggaatatattatgatgggctacttgtgtcccaatcactcaagagcatcgcaagatgtgtattctggtcagagactatagttgatgaaacaagggcagcatgcagtaatattgctacaacaatggctaaaagcatcgagagaggttatgaccgttaccttgcatattccctgaacgtcctaaaagtgatacagcaaattctgatctctcttggcttcacaatcaattcaaccatgacccgggatgtagtcatacccctcctcacaaacaacgacctcttaataaggatggcactgttgcccgctcctattggggggatgaattatctgaatatgagcaggctgtttgtcagaaacatcggtgatccagtaacatcatcaattgctgatctcaagagaatgattctcgcctcactaatgcctgaagagaccctccatcaagtaatgacacaacaaccgggggactcttcattcctagactgggctagcgacccttactcagcaaatcttgtatgtgtccagagcatcactagactcctcaagaacataactgcaaggtttgtcctgatccatagtccaaacccaatgttaaaaggattattccatgatgacagtaaagaagaggacgagggactggcggcattcctcatggacaggcatattatagtacctagggcagctcatgaaatcctggatcatagtgtcacaggggcaagagagtctattgcaggcatgctggataccacaaaaggcttgattcgagccagcatgaggaagggggggttaacctctcgagtgataaccagattgtccaattatgactatgaacaattcagagcagggatggtgctattgacaggaagaaagagaaatgtcctcattgacaaagagtcatgttcagtgcagctggcgagagctctaagaagccatatgtgggcgaggctagctcgaggacggcctatttacggccttgaggtccctgatgtactagaatctatgcgaggccaccttattcggcgtcatgagacatgtgtcatctgcgagtgtggatcagtcaactacggatggttttttgtcccctcgggttgccaactggatgatattgacaaggaaacatcatccttgagagtcccatatattggttctaccactgatgagagaacagacatgaagcttgccttcgtaagagccccaagtcgatccttgcgatctgctgttagaatagcaacagtgtactcatgggcttacggtgatgatgatagctcttggaacgaagcctggttgttggctaggcaaagggccaatgtgagcctggaggagctaagggtgatcactcccatctcaacttcgactaatttagcgcataggttgagggatcgtagcactcaagtgaaatactcaggtacatcccttgtccgagtggcgaggtataccacaatctccaacgacaatctctcatttgtcatatcagataagaaggttgatactaactttatataccaacaaggaatgcttctagggttgggtgttttagaaacattgtttcgactcgagaaagataccggatcatctaacacggtattacatcttcacgtcgaaacagattgttgcgtgatcccgatgatagatcatcccaggatacccagctcccgcaagctagagctgagggcagagctatgtaccaacccattgatatatgataatgcacctttaattgacagagatgcaacaaggctatacacccagagccataggaggcaccttgtggaatttgttacatggtccacaccccaactatatcacattttagctaagtccacagcactatctatgattgacctggtaacaaaatttgagaaggaccatatgaatgaaatttcagctctcataggggatgacgatatcaatagtttcataactgagtttctgctcatagagccaagattattcactatctacttgggccagtgtgcggccatcaattgggcatttgatgtacattatcatagaccatcagggaaatatcagatgggtgagctgttgtcatcgttcctttctagaatgagcaaaggagtgtttaaggtgcttgtcaatgctctaagccacccaaagatctacaagaaattctggcattgtggtattatagagcctatccatggtccttcacttgatgctcaaaacttgcacacaactgtgtgcaacatggtttacacatgctatatgacctacctcgacctgttgttgaatgaagagttagaagagttcacatttctcttgtgtgaaagcgacgaggatgtagtaccggacagattcgacaacatccaggcaaaacacttatgtgttctggcagatttgtactgtcaaccagggacctgcccaccaattcgaggtctaagaccggtagagaaatgtgcagttctaaccgaccatatcaaggcagaggctatgttatctccagcaggatcttcgtggaacataaatccaattattgtagaccattactcatgctctctgacttatctccggcgaggatcgatcaaacagataagattgagagttgatccaggattcattttcgacgccctcgctgaggtaaatgtcagtcagccaaagatcggcagcaacaacatctcaaatatgagcatcaaggctttcagacccccacacgatgatgttgcaaaattgctcaaagatatcaacacaagcaagcacaatcttcccatttcagggggcaatctcgccaattatgaaatccatgctttccgcagaatcgggttgaactcatctgcttgctacaaagctgttgagatatcaacattaattaggagatgccttgagccaggggaggacggcttgttcttgggtgagggatcgggttctatgttgatcacttataaagagatacttaaactaaacaagtgcttctataatagtggggtttccgccaattctagatctggtcaaagggaattagcaccctatccctccgaagttggccttgtcgaacacagaatgggagtaggtaatattgtcaaagtgctctttaacgggaggcccgaagtcacgtgggtaggcagtgtagattgcttcaatttcatagttagtaatatccctacctctagtgtggggtttatccattcagatatagagaccttgcctgacaaagatactatagagaagctagaggaattggcagccatcttatcgatggctctgctcctgggcaaaataggatcaatactggtgattaagcttatgcctttcagcggggattttgttcagggatttataagttatgtagggtctcattatagagaagtgaaccttgtataccctagatacagcaacttcatctctactgaatcttatttggttatgacagatctcaaggctaaccggctaatgaatcctgaaaagattaagcagcagataattgaatcatctgtgaggacttcacctggacttataggtcacatcctatccattaagcaactaagctgcatacaagcaattgtgggagacgcagttagtagaggtgatatcaatcctactctgaaaaaacttacacctatagagcaggtgctgatcaattgcgggttggcaattaacggacctaagctgtgcaaagaattgatccaccatgatgttgcctcagggcaagatggattgcttaattctatactcatcctctacagggagttggcaagattcaaagacaaccaaagaagtcaacaagggatgttccacgcttaccccgtattggtaagtagcaggcaacgagaacttatatctaggatcacccgcaaattctgggggcacattcttctttactccgggaacaaaaagttgataaataagtttatccagaatctcaagtccggctatctgatactagacttacaccagaatatcttcgttaagaatctatccaagtcagagaaacagattattatgacggggggtttgaaacgtgagtgggtttttaaggtaacagtcaaggagaccaaagaatggtataagttagtcggatacagtgccctgattaaggactaattggttgaactccggaaccctaatcctgccctaggtggttaggcattatttgcaatatattaaagaaaactttgaaaatacgaagtttctattcccagctttgtctggt

SEQ ID NO: 80 - DNA, 21515 bp, synthetic construct
  source 1..21515: mol_type = other DNA
accaaacaaagttgggtaaggatagttcaatcaatgatcatcttctagtgcacttaggattcaagatcctattatcagggacaagagcaggattagggatatccgagatggccacacttttaaggagcttagcattgttcaaaagaaacaaggacaaaccacccattacatcaggatccggtggagccatcagaggaatcaaacacattattatagtaccaatccctggagattcctcaattaccactcgatccagacttctggaccggttggtgaggttaattggaaacccggatgtgagcgggcccaaactaacaggggcactaataggtatattatccttatttgtggagtctccaggtcaattgattcagaggatcaccgatgaccctgacgttagcataaggctgttagaggttgtccagagtgaccagtcacaatctggccttaccttcgcatcaagaggtaccaacatggaggatgaggcggaccaatacttttcacatgatgatccaattagtagtgatcaatccaggttcggatggttcgggaacaaggaaatctcagatattgaagtgcaagaccctgagggattcaacatgattctgggtaccatcctagcccaaatttgggtcttgctcgcaaaggcggttacggccccagacacggcagctgattcggagctaagaaggtggataaagtacacccaacaaagaagggtagttggtgaatttagattggagagaaaatggttggatgtggtgaggaacaggattgccgaggacctctccttacgccgattcatggtcgctctaatcctggatatcaagagaacacccggaaacaaacccaggattgctgaaatgatatgtgacattgatacatatatcgtagaggcaggattagccagttttatcctgactattaagtttgggatagaaactatgtatcctgctcttggactgcatgaatttgctggtgagttatccacacttgagtccttgatgaacctttaccagcaaatgggggaaactgcaccctacatggtaatcctggagaactcaattcagaacaagttcagtgcaggatcataccctctgctctggagctatgccatgggagtaggagtggaacttgaaaactccatgggaggtttgaactttggccgatcttactttgatccagcatattttagattagggcaagagatggtaaggaggtcagctggaaaggtcagttccacattggcatctgaactcggtatcactgccgaggatgcaaggcttgtttcagagattgcaatgcatactactgaggacaagatcagtagagcggttggacccagacaagcccaagtatcatttctacacggtgatcaaagtgagaatgagctaccgagattggggggcaaggaagataggagggtcaaacagagtcgaggagaagccagggagagctacagagaaaccgggcccagcagagcaagtgatgcgagagctgcccatcttccaaccggcacacccctagacattgacactgcaacggagtccagccaagatccgcaggacagtcgaaggtcagctgacgccctgcttaggctgcaagccatggcaggaatctcggaagaacaaggctcagacacggacacccctatagtgtacaatgacagaaatcttctagactaggtgcgagaggccgagggccagaacaacatccgcctaccatccatcattgttataaaaaacttaggaaccaggtccacacagccgccagcccatcaaccatccactcccacgattggagccaatggcagaagagcaggcacgccatgtcaaaaacggactggaatgcatccgggctctcaaggccgagcccatcggctcactggccatcgaggaagctatggcagcatggtcagaaatatcagacaacccaggacaggagcgagccacctgcagggaagagaaggcaggcagttcgggtctcagcaaaccatgcctctcagcaattggatcaactgaaggcggtgcacctcgcatccgcggtcagggacctggagagagcgatgacgacgctgaaactttgggaatccccccaagaaatctccaggcatcaagcactgggttacagtgttattacgtttatgatcacagcggtgaagcggttaagggaatccaagatgctgactctatcatggttcaatcaggccttgatggtgatagcaccctctcaggaggagacaatgaatctgaaaacagcgatgtggatattggcgaacctgataccgagggatatgctatcactgaccggggatctgctcccatctctatggggttcagggcttctgatgttgaaactgcagaaggaggggagatccacgagctcctgagactccaatccagaggcaacaactttccgaagcttgggaaaactctcaatgttcctccgcccccggaccccggtagggccagcacttccgggacacccattaaaaagggcacagacgcgagattagcctcatttggaacggagatcgcgtctttattgacaggtggtgcaacccaatgtgctcgaaagtcaccctcggaaccatcagggccaggtgcacctgcggggaatgtccccgagtgtgtgagcaatgccgcactgatacaggagtggacacccgaatctggtaccacaatctccccgagatcccagaataatgaagaagggggagactattatgatgatgagctgttctctgatgtccaagatattaaaacagccttggccaaaatacacgaggataatcagaagataatctccaagctagaatcactgctgttattgaagggagaagttgagtcaattaagaagcagatcaacaggcaaaatatcagcatatccaccctggaaggacacctctcaagcatcatgatcgccattcctggacttgggaaggatcccaacgaccccactgcagatgtcgaaatcaatcccgacttgaaacccatcataggcagagattcaggccgagcactggccgaagttctcaagaaacccgttgccagccgacaactccaaggaatgacaaatggacggaccagttccagaggacagctgctgaaggaatttcagctaaagccgatcgggaaaaagatgagctcagccgtcgggtttgttcctgacaccggccctgcatcacgcagtgtaatccgctccattataaaatccagccggctagaggaggatcggaagcgttacctgatgactctccttgatgatatcaaaggagccaatgatcttgccaagttccaccagatgctgatgaagataataatgaagtagctacagctcaacttacctgccaaccccatgccagtcgacccaactagcctaccctccatcattgttataaaaaacttaggaaccaggtccacacagccgccagcccatcaacgcgtacggccaccatgggtagacttacaagtggggtgggaactgccgcacttttggttgttgctgtgggcttgcgagtggtttgcgctaaatacgcactcgccgatccgtccctcaaaatggcagaccccaatcggtttcggggcaagaatttgccagtccttgaccagctgacagaccctccaggggttaagagagtgtatcacatccagccctcccttgaggaccccttccaacccccatctataccgatcaccgtgtattacgccgtgctcgaacgcgcttgcaggtctgtgttgctgcacgcaccatctgaggctccccagattgttagaggggcaagcgacgaagcgagaaagcacacttacaacctcaccatagcttggtaccgcatgggcgacaactgcgccatcccaatcactgttatggaatatactgagtgcccttacaataaatctctgggtgtgtgtcctattaggacacagcctcgctggagctactatgactccttctctgccgtgagtgaagataatttgggtttcctgatgcacgcacccgcctttgagacagcaggtacgtaccttaggcttgtaaaaatcaacgattggaccgagataacccagtttattctggagcacagggctagagcatcctgtaaatacgcgttgccactccggataccaccagccgcttgcttgacctccaaggcttatcaacagggcgtaacggtggattccatcggcatgctccctaggttcatccctgaaaatcaaagaacggtggcactgtattcactcaagattgccggctggcacggccctaagccaccatacacctctactctgctgcccccggagctgagtgataccactaacgcaacccagcctgaactggtgccagaggatcctgaagattctgcattgctggaagacccagccggcactgtgtctagtcaaattccccctaattggcacataccgagcattcaggacgttgctccacaccacgctccggctgctccaagcaatcctggcctgataataggtgcattggccggttctaccctcgccgtcctggtgattgggggtatcgccttctgggttaggaggagagctcaaatggcccccaagcgcttgaggttgccgcacataagagacgacgacgcccccccttctcaccagcctctgttttattagttcgaactacagctcaacttacctgccaaccccatgccagtcgacccaactagtacaacctaaatccattataaaaaacttaggaaccaggtccacacagccgccagcccatcaaccatccactcccacgattggaggccggccatgaggggaggaggccttgtctgtgcacttgttgtaggagctttggtcgccgccgtagctagtgcagctccagcagcaccaagggcttcaggaggggttgcagctactgttgctgctaacggaggacctgctagccaaccacctccggtgccttctccggctactaccaaagcccgcaagcgaaaaacaaagaagcccccaaagaggccagaggccacacctccacccgacgctaacgctactgtggcggctggacacgctactttgagagcccacctgcgggaaatcaaggttgagaacgcagacgcacaattctacgtttgtcccccccctacaggtgcaacagtcgtgcagtttgagcagccaagacgctgtcctactaggcctgagggacaaaattacaccgagggtatcgccgtagtttttaaggagaatatcgcaccctataagtttaaagcgacaatgtactataaggatgtgaccgtcagccaagtctggtttggtcaccgatacagtcagtttatgggaatctttgaggaccgggccccggtccctttcgaagaagtgatcgacaagattaacgccaagggagtgtgcaggtcaaccgcaaagtacgtccgaaacaatatggaaacaaccgccttccacagggacgaccacgaaacagatatggagcttaagccggctaaagtggccactcgcacgtcaagaggttggcataccacggacctgaaatataacccttctagagttgaagctttccaccggtatgggaccacggtgaactgtattgtggaagaagtggacgccagatccgtgtacccctacgacgaattcgttcttgctacaggcgatttcgtgtatatgtctcctttctacggctacagggagggctcccacaccgagcacacctcctacgccgcagatagatttaaacaggtggacggcttctacgctcgcgatctgactactaaggcacgggcaacaagcccaacaactcgcaatttgctgaccacaccaaagtttactgtggcctgggactgggtacccaagaggcctgctgtttgcacaatgaccaaatggcaggaggttgacgagatgctccgggccgaatatggaggatcctttagattctcttctgacgctatcagtaccaccttcaccacaaatctgactcagtactctctgtctcgcgtagatctgggagactgtatcggtagggacgcacgcgaggctatagatcggatgttcgcccggaaatacaacgccacccacattaaagtggggcagccccagtattacttggctactgggggcttccttatcgcttatcagcctctgctctcaaataccctggcggagctttatgtacgcgagtatatgagggagcaggacaggaagccacgcaacgctaccccagcacccctgagagaagcgccttctgccaacgcgagtgtggaacgaattaagaccacgtcttcaatcgaattcgctcggctccaatttacctacaaccacattcaacgccacgttaacgatatgctgggaaggattgcagttgcttggtgtgagctccagaaccacgaactgacactgtggaacgaggccagaaagcttaacccaaacgctattgcttccgcgacagttggaagaagagtgtctgcacgaatgctcggcgacgttatggctgttagtacctgtgtgcctgtggcccctgacaatgtaattgttcagaacagtatgagagtctcttctagacccggcacttgctactccaggccactggtctcttttcgctacgaggatcaggggcctttgatcgagggccagttgggagagaataacgaactgcgcctgaccagagacgctctggaaccctgtacagtcggccacagacgatattttatattcggcggcggttacgtatattttgaagagtatgcgtactcccaccaactgtccagagcagatgtgaccactgtgagcacttttatcgatctcaatatcactatgctggaggatcacgagtttgttccgttggaagtgtacactcggcacgagatcaaggacagtggcctgctcgattataccgaagtccagaggcgcaatcaactgcacgatctgagatttgccgatattgacacagtgattagggctgacgctaacgccgctatgtttgctggcctgtgtgcctttttcgagggaatgggtgatctcggaagagccgtaggcaaggtggttatgggagtcgtaggtggcgtcgttagtgccgtgtcaggggtgtctagctttatgtctaaccccttcggagctttggctgtgggtctcctggtacttgccggactggtggccgcattttttgcctttaggtacgtcctgcagctgcagaggaatccaatgaaggccctgtatccacttacaacaaaggaacttaaaacctccgatcctggaggagttggaggagaaggcgaagagggagcggaaggtggtgggtttgacgaggccaagttggctgaggcccgagagatgataaggtatatggctctcgtatctgcaatggagagaactgagcacaaagctcgcaagaagggaaccagtgccctgctgagcagcaaagtgacaaatatgtaatgactattcgaactactcagctagtctacgcgccgtagcctaccctccatcattgttataaaaaacttaggagcaaagtccacacagccgccgataaggtccacaatggcattgggtagagttggtttggctgtgggactttggggtctcctctgggtcggtgtggttgtcgtactggctaacgcttctccaggccgcactattactgttggaccgagagggaacgcttccaacgctgctccctctgcctcccctaggaacgcttctgctcctagaactacacctactccaccgcaaccccgcaaagcaaccaaaagcaaggcctcaaccgctaaaccagctcctccaccgaagacaggcccacctaaaaccagcagcgagcccgtgcggtgtaatcgacacgatcccctggcccgatacggtagtcgggtgcaaatccgctgtaggtttcctaatagtactagaacagaaagcaggctgcagatctggagatacgccactgccactgacgcagaaatcgggaccgccccttcccttgaggaggtgatggtgaacgtaagcgctccaccaggaggtcagctcgtctacgactcagcacccaataggaccgatccacacgtgatttgggcagaaggagctggaccaggcgcctctccaaggttgtattccgttgtaggcccactgggtcggcagagactgattatcgaagaactgactctggaaacccagggaatgtactattgggtttggggaaggactgataggcctagtgcttacggtacttgggtgagagtcagggtatttcggcctccttccctgactatacacccacacgcagtgctcgagggtcagcctttcaaggccacttgcacagccgcaacttactaccctgggaaccgagcagagtttgtgtggtttgaagacgggcggagagtttttgaccccgcacagatccacacgcagacccaggaaaaccctgacggattctccaccgttagcactgtgacctctgccgcagttggaggacaaggaccgccaaggaccttcacctgtcagctgacctggcaccgcgactctgtttcagcgtctagacggaacgcgagcggtactgcctctgtgctccccagacccacaatcacaatggagttcaccggcgatcacgccgtgtgtacggctggttgtgtacccgaaggcgtgacctttgcttggtttttgggagacgatagctcacctgccgagaaagtcgcagtggcttcacaaacttcctgcggaaggcccgggactgccactatccgatctacgctccccgtgtcttacgagcagacagaatatatttgccgactggcaggatatccagacggaatacccgtcctggaacaccacggttctcaccagcctccaccgagagatccaaccgagcgacaggtaatcagagccgtggaaggagcgggtattggcgtggcagttctcgttgctgtcgtacttgccggcacggctgttgtgtatctcactcacgccagcagcgtgcgatacaggcgcctcagatgataagcgcgcagcgcttagacgtctcgcgatcgatactagtacaacctaaatccattataaaaaacttaggagcaaagtgattgcctcccaaggtccacaatgacagagacctacgacttcgacaagtcggcatgggacatcaaagggtcgatcgctccgatacaacccaccacctacagtgatggcaggctggtgccccaggtcagagtcatagatcctggtctaggcgacaggaaggatgaatgctttatgtacatgtttctgctgggggttgttgaggacagcgattccctagggcctccaatcgggcgagcatttgggttcctgcccttaggtgttggcagatccacagcaaagcccgaaaaactcctcaaagaggccactgagcttgacatagttgttagacgtacagcagggctcaatgaaaaactggtgttctacaacaacaccccactaactctcctcacaccttggagaaaggtcctaacaacagggagtgtcttcaacgcaaaccaagtgtgcaatgcggttaatctgataccgctcgataccccgcagaggttccgtgttgtttatatgagcatcacccgtctttcggataacgggtattacaccgttcctagaagaatgctggaattcagatcggtcaatgcagtggccttcaacctgctggtgacccttaggattgacaaggcgataggccctgggaagatcatcgacaatacagagcaacttcctgaggcaacatttatggtccacatcgggaacttcaggagaaagaagagtgaagtctactctgccgattattgcaaaatgaaaatcgaaaagatgggcctggtttttgcacttggtgggatagggggcaccagtcttcacattagaagcacaggcaaaatgagcaagactctccatgcacaactcgggttcaagaagaccttatgttacccgctgatggatatcaatgaagaccttaatcgattactctggaggagcagatgcaagatagtaagaatccaggcagttttgcagccatcagttcctcaagaattccgcatttacgacgacgtgatcataaatgatgaccaaggactattcaaagttctgtagaccgtagtgcccagcaatgcccgaaaacgacccccctcacaatgacagccagaaggcccggacaaaaaagccccctccgaaagactccacggaccaagcgagaggccagccagcagccgacggcaagcgcgaacaccaggcggccccagcacagaacagccctgacacaaggccaccaccagccaccccaatctgcatcctcctcgtgggacccccgaggaccaacccccaaggctgcccccgatccaaaccaccaaccgcatccccaccacccccgggaaagaaacccccagcaattggaaggcccctccccctcttcctcaacacaagaactccacaaccgaaccgcacaagcgaccgaggtgacccaaccgcaggcatccgactccctagacagatcctctctccccggcaaactaaacaaaacttagggccaaggaacatacacacccaacagaacccagaccccggcccacggcgccgcgcccccaacccccgacaaccagagggagcccccaaccaatcccgccggctcccccggtgcccacaggcagggacaccaacccccgaacagacccagcacccaaccatcgacaatccaagacgggggggcccccccaaaaaaaggcccccaggggccgacagccagcaccgcgaggaagcccacccaccccacacacgaccacggcaaccaaaccagaacccagaccaccctgggccaccagctcccagactcggccatcaccccgcagaaaggaaaggccacaacccgcgcaccccagccccgatccggcggggagccacccaacccgaaccagcacccaagagcgatccccgaaggacccccgaaccgcaaaggacatcagtatcccacagcctctccaagtcccccggtctcctcctcttctcgaagggaccaaaagatcaatccaccacacccgacgacactcaactccccacccctaaaggagacaccgggaatcccagaatcaagactcatccaatgtccatcatgggtctcaaggtgaacgtctctgccatattcatggcagtactgttaactctccaaacacccaccggtcaaatccattggggcaatctctctaagataggggtggtaggaataggaagtgcaagctacaaagttatgactcgttccagccatcaatcattagtcataaaattaatgcccaatataactctcctcaataactgcacgagggtagagattgcagaatacaggagactactgagaacagttttggaaccaattagagatgcacttaatgcaatgacccagaatataagaccggttcagagtgtagcttcaagtaggagacacaagagatttgcgggagtagtcctggcaggtgcggccctaggcgttgccacagctgctcagataacagccggcattgcacttcaccagtccatgctgaactctcaagccatcgacaatctgagagcgagcctggaaactactaatcaggcaattgagacaatcagacaagcagggcaggagatgatattggctgttcagggtgtccaagactacatcaataatgagctgataccgtctatgaaccaactatcttgtgatttaatcggccagaagctcgggctcaaattgctcagatactatacagaaatcctgtcattatttggccccagtttacgggaccccatatctgcggagatatctatccaggctttgagctatgcgcttggaggagacatcaataaggtgttagaaaagctcggatacagtggaggtgatttactgggcatcttagagagcggaggaataaaggcccggataactcacgtcgacacagagtcctacttcattgtcctcagtatagcctatccgacgctgtccgagattaagggggtgattgtccaccggctagagggggtctcgtacaacataggctctcaagagtggtataccactgtgcccaagtatgttgcaacccaagggtaccttatctcgaattttgatgagtcatcgtgtactttcatgccagaggggactgtgtgcagccaaaatgccttgtacccgatgagtcctctgctccaagaatgcctccgggggtacaccaagtcctgtgctcgtacactcgtatccgggtcttttgggaaccggttcattttatcacaagggaacctaatagccaattgtgcatcaatcctttgcaagtgttacacaacaggaacgatcattaatcaagaccctgacaagatcctaacatacattgctgccgatcactgcccggtagtcgaggtgaacggcgtgaccatccaagtcgggagcaggaggtatccagacgctgtgtacttgcacagaattgacctcggtcctcccatatcattggagaggttggacgtagggacaaatctggggaatgcaattgctaagttggaggatgccaaggaattgttggagtcatcggaccagatattgaggagtatgaaaggtttatcgagcactagcatagtctacatcctgattgcagtgtgtcttggagggttgatagggatccccgctttaatatgttgctgcagggggcgttgtaacaaaaagggagaacaagttggtatgtcaagaccaggcctaaagcctgatcttacgggaacatcaaaatcctatgtaaggtcgctctgatcctctacaactcttgaaacacaaatgtcccacaagtctcctcttcgtcatcaagcaaccaccgcacccagcatcaagcccacctgaaattatctccggcttccctctggccgaacaatatcggtagttaatcaaaacttagggtgcaagatcatccacaatgtcaccacaacgagaccggataaatgccttctacaaagataacccccatcccaagggaagtaggatagtcattaacagagaacatcttatgattgatagaccttatgttttgctggctgttctgtttgtcatgtttctgagcttgatcgggttgctagccattgcaggcattagacttcatcgggcagccatctacaccgcagagatccataaaagcctcagcaccaatctagatgtaactaactcaatcgagcatcaggtcaaggacgtgctgacaccactcttcaaaatcatcggtgatgaagtgggcctgaggacacctcagagattcactgacctagtgaaattaatctctgacaagattaaattccttaatccggatagggagtacgacttcagagatctcacttggtgtatcaacccgccagagagaatcaaattggattatgatcaatactgtgcagatgtggctgctgaagagctcatgaatgcattggtgaactcaactctactggagaccagaacaaccaatcagttcctagctgtctcaaagggaaactgctcagggcccactacaatcagaggtcaattctcaaacatgtcgctgtccctgttagacttgtatttaggtcgaggttacaatgtgtcatctatagtcactatgacatcccagggaatgtatgggggaacttacctagtggaaaagcctaatctgagcagcaaaaggtcagagttgtcacaactgagcatgtaccgagtgtttgaagtaggtgttatcagaaatccgggtttgggggctccggtgttccatatgacaaactatcttgagcaaccagtcagtaatgatctcagcaactgtatggtggctttgggggagctcaaactcgcagccctttgtcacggggaagattctatcacaattccctatcagggatcagggaaaggtgtcagcttccagctcgtcaagctaggtgtctggaaatccccaaccgacatgcaatcctgggtccccttatcaacggatgatccagtgatagacaggctttacctctcatctcacagaggtgttatcgctgacaatcaagcaaaatgggctgtcccgacaacacgaacagatgacaagttgcgaatggagacatgcttccaacaggcgtgtaagggtaaaatccaagcactctgcgagaatcccgagtgggcaccattgaaggataacaggattccttcatacggggtcttgtctgttgatctgagtctgacagttgagcttaaaatcaaaattgcttcgggattcgggccattgatcacacacggttcagggatggacctatacaaatccaaccacaacaatgtgtattggctgactatcccgccaatgaagaacctagccttaggtgtaatcaacacattggagtggataccgagattcaaggttagtccctacctcttcactgtcccaattaaggaagcaggcgaagactgccatgccccaacatacctacctgcggaggtggatggtgatgtcaaactcagttccaatctggtgattctacctggtcaagatctccaatatgttttggcaacctacgatacttccagggttgaacatgctgtggtttattacgtttacagcccaagccgctcattttcttacttttatccttttaggttgcctataaagggggtccccatcgaattacaagtggaatgcttcacatgggaccaaaaactctggtgccgtcacttctgtgtgcttgcggactcagaatctggtggacatatcactcactctgggatggtgggcatgggagtcagctgcacagtcacccgggaagatggaaccaatcgcagatagggctgctagtgaaccaatcacatgatgtcacccagacatcaggcatacccactagtgtgaaatagacatcagaattaagaaaaacgtagggtccaagtggttccccgttatggactcgctatctgtcaaccagatcttataccctgaagttcacctagatagcccgatagttaccaataagatagtagccatcctggagtatgctcgagtccctcacgcttacagcctggaggaccctacactgtgtcagaacatcaagcaccgcctaaaaaacggattttccaaccaaatgattataaacaatgtggaagttgggaatgtcatcaagtccaagcttaggagttatccggcccactctcatattccatatccaaattgtaatcaggatttatttaacatagaagacaaagagtcaacgaggaagatccgtgaactcctcaaaaaggggaattcgctgtactccaaagtcagtgataaggttttccaatgcttaagggacactaactcacggcttggcctaggctccgaattgagggaggacatcaaggagaaagttattaacttgggagtttacatgcacagctcccagtggtttgagccctttctgttttggtttacagtcaagactgagatgaggtcagtgattaaatcacaaacccatacttgccataggaggagacacacacctgtattcttcactggtagttcagttgagttgctaatctctcgtgaccttgttgctataatcagtaaagagtctcaacatgtatattacctgacatttgaactggttttgatgtattgtgatgtcatagaggggaggttaatgacagagaccgctatgactattgatgctaggtatacagagcttctaggaagagtcagatacatgtggaaactgatagatggtttcttccctgcactcgggaatccaacttatcaaattgtagccatgctggagcctctttcacttgcttacctgcagctgagggatataacagtagaactcagaggtgctttccttaaccactgctttactgaaatacatgatgttcttgaccaaaacgggttttctgatgaaggtacttatcatgagttaactgaagctctagattacattttcataactgatgacatacatctgacaggggagattttctcatttttcagaagtttcggccaccccagacttgaagcagtaacggctgctgaaaatgttaggaaatacatgaatcagcctaaagtcattgtgtatgagactctgatgaaaggtcatgccatattttgtggaatcataatcaacggctatcgtgacaggcacggaggcagttggccaccgctgaccctccccctgcatgctgcagacacaatccggaatgctcaagcttcaggtgaagggttaacacatgagcagtgcgttgataactggaaatcttttgctggagtgaaatttggctgctttatgcctcttagcctggatagtgatctgacaatgtacctaaaggacaaggcacttgctgctctccaaagggaatgggattcagtttacccgaaagagttcctgcgttacgaccctcccaagggaaccgggtcacggaggcttgtagatgttttccttaatgattcgagctttgacccatatgatgtgataatgtatgttgtaagtggagcttacctccatgaccctgagttcaacctgtcttacagcctgaaagaaaaggagatcaaggaaacaggtagactttttgctaaaatgacttacaaaatgagggcatgccaagtgattgctgaaaatctaatctcaaacgggattggcaaatattttaaggacaatgggatggccaaggatgagcacgatttgactaaggcactccacactctagctgtctcaggagtccccaaagatctcaaagaaagtcacaggggggggccagtcttaaaaacctactcccgaagcccagtccacacaagtaccaggaacgtgagagcagcaaaagggtttatagggttccctcaagtaattcggcaggaccaagacactgatcatccggagaatatggaagcttacgagacagtcagtgcatttatcacgactgatctcaagaagtactgccttaattggagatatgagaccatcagcttgtttgcacagaggctaaatgagatttacggattgccctcatttttccagtggctgcataagaggcttgagacctctgtcctgtatgtaagtgaccctcattgcccccccgaccttgacgcccatatcccgttatataaagtccccaatgatcaaatcttcattaagtaccctatgggaggtatagaagggtattgtcagaagctgtggaccatcagcaccattccctatctatacctggctgcttatgagagcggagtaaggattgcttcgttagtgcaaggggacaatcagaccatagccgtaacaaaaagggtacccagcacatggccctacaaccttaagaaacgggaagctgctagagtaactagagattactttgtaattcttaggcaaaggctacatgatattggccatcacctcaaggcaaatgagacaattgtttcatcacatttttttgtctattcaaaaggaatatattatgatgggctacttgtgtcccaatcactcaagagcatcgcaagatgtgtattctggtcagagactatagttgatgaaacaagggcagcatgcagtaatattgctacaacaatggctaaaagcatcgagagaggttatgaccgttaccttgcatattccctgaacgtcctaaaagtgatacagcaaattctgatctctcttggcttcacaatcaattcaaccatgacccgggatgtagtcatacccctcctcacaaacaacgacctcttaataaggatggcactgttgcccgctcctattggggggatgaattatctgaatatgagcaggctgtttgtcagaaacatcggtgatccagtaacatcatcaattgctgatctcaagagaatgattctcgcctcactaatgcctgaagagaccctccatcaagtaatgacacaacaaccgggggactcttcattcctagactgggctagcgacccttactcagcaaatcttgtatgtgtccagagcatcactagactcctcaagaacataactgcaaggtttgtcctgatccatagtccaaacccaatgttaaaaggattattccatgatgacagtaaagaagaggacgagggactggcggcattcctcatggacaggcatattatagtacctagggcagctcatgaaatcctggatcatagtgtcacaggggcaagagagtctattgcaggcatgctggataccacaaaaggcttgattgagccagcatgaggaagggggggttaacctctcgagtgataaccagattgtccaattatgactatgaacaattcagagcagggatggtgctattgacaggaagaaagagaaatgtcctcattgacaaagagtcatgttcagtgcagctggcgagagctctaagaagccatatgtgggcgaggctagctcgaggacggcctatttacggccttgaggtccctgatgtactagaatctatgcgaggccaccttattcggcgtcatgagacatgtgtcatctgcgagtgtggatcagtcaactacggatggttttttgtcccctcgggttgccaactggatgatattgacaaggaaacatcatccttgagagtcccatatattggttctaccactgatgagagaacagacatgaagcttgccttcgtaagagccccaagtcgatccttgcgatctgctgttagaatagcaacagtgtactcatgggcttacggtgatgatgatagctcttggaacgaagcctggttgttggctaggcaaagggccaatgtgagcctggaggagctaagggtgatcactcccatctcaacttcgactaatttagcgcataggttgagggatcgtagcactcaagtgaaatactcaggtacatcccttgtccgagtggcgaggtataccacaatctccaacgacaatctctcatttgtcatatcagataagaaggttgatactaactttatataccaacaaggaatgcttctagggttgggtgttttagaaacattgtttcgactcgagaaagataccggatcatctaacacggtattacatcttcacgtcgaaacagattgttgcgtgatcccgatgatagatcatcccaggatacccagctcccgcaagctagagctgagggcagagctatgtaccaacccattgatatatgataatgcacctttaattgacagagatgcaacaaggctatacacccagagccataggaggcaccttgtggaatttgttacatggtccacaccccaactatatcacattttagctaagtccacagcactatctatgattgacctggtaacaaaatttgagaaggaccatatgaatgaaatttcagctctcataggggatgacgatatcaatagtttcataactgagtttctgctcatagagccaagattattcactatctacttgggccagtgtgcggccatcaattgggcatttgatgtacattatcatagaccatcagggaaatatcagatgggtgagctgttgtcatcgttcctttctagaatgagcaaaggagtgtttaaggtgcttgtcaatgctctaagccacccaaagatctacaagaaattctggcattgtggtattatagagcctatccatggtccttcacttgatgctcaaaacttgcacacaactgtgtgcaacatggtttacacatgctatatgacctacctcgacctgttgttgaatgaagagttagaagagttcacatttctcttgtgtgaaagcgacgaggatgtagtaccggacagattcgacaacatccaggcaaaacacttatgtgttctggcagatttgtactgtcaaccagggacctgcccaccaattcgaggtctaagaccggtagagaaatgtgcagttctaaccgaccatatcaaggcagaggctatgttatctccagcaggatcttcgtggaacataaatccaattattgtagaccattactcatgctctctgacttatctccggcgaggatcgatcaaacagataagattgagagttgatccaggattcattttcgacgccctcgctgaggtaaatgtcagtcagccaaagatcggcagcaacaacatctcaaatatgagcatcaaggctttcagacccccacacgatgatgttgcaaaattgctcaaagatatcaacacaagcaagcacaatcttcccatttcagggggcaatctcgccaattatgaaatccatgctttccgcagaatcgggttgaactcatctgcttgctacaaagctgttgagatatcaacattaattaggagatgccttgagccaggggaggacggcttgttcttgggtgagggatcgggttctatgttgatcacttataaagagatacttaaactaaacaagtgcttctataatagtggggtttccgccaattctagatctggtcaaagggaattagcaccctatccctccgaagttggccttgtcgaacacagaatgggagtaggtaatattgtcaaagtgctctttaacgggaggcccgaagtcacgtgggtaggcagtgtagattgcttcaatttcatagttagtaatatccctacctctagtgtggggtttatccattcagatatagagaccttgcctgacaaagatactatagagaagctagaggaattggcagccatcttatcgatggctctgctcctgggcaaaataggatcaatactggtgattaagcttatgcctttcagcggggattttgttcagggatttataagttatgtagggtctcattatagagaagtgaaccttgtataccctagatacagcaacttcatctctactgaatcttatttggttatgacagatctcaaggctaaccggctaatgaatcctgaaaagattaagcagcagataattgaatcatctgtgaggacttcacctggacttataggtcacatcctatccattaagcaactaagctgcatacaagcaattgtgggagacgcagttagtagaggtgatatcaatcctactctgaaaaaacttacacctatagagcaggtgctgatcaattgcgggttggcaattaacggacctaagctgtgcaaagaattgatccaccatgatgttgcctcagggcaagatggattgcttaattctatactcatcctctacagggagttggcaagattcaaagacaaccaaagaagtcaacaagggatgttccacgcttaccccgtattggtaagtagcaggcaacgagaacttatatctaggatcacccgcaaattctgggggcacattcttctttactccgggaacaaaaagttgataaataagtttatccagaatctcaagtccggctatctgatactagacttacaccagaatatcttcgttaagaatctatccaagtcagagaaacagattattatgacggggggtttgaaacgtgagtgggtttttaaggtaacagtcaaggagaccaaagaatggtataagttagtcggatacagtgccctgattaaggactaattggttgaactccggaaccctaatcctgccctaggtggttaggcattatttgcaatatattaaagaaaactttgaaaatacgaagtttctattcccagctttgtctggt

SEQ ID NO: 81 - DNA, 25317 bp, synthetic construct
  source 1..25317: mol_type = other DNA
accaaacaaagttgggtaaggatagttcaatcaatgatcatcttctagtgcacttaggattcaagatcctattatcagggacaagagcaggattagggatatccgagatggccacacttttaaggagcttagcattgttcaaaagaaacaaggacaaaccacccattacatcaggatccggtggagccatcagaggaatcaaacacattattatagtaccaatccctggagattcctcaattaccactcgatccagacttctggaccggttggtgaggttaattggaaacccggatgtgagcgggcccaaactaacaggggcactaataggtatattatccttatttgtggagtctccaggtcaattgattcagaggatcaccgatgaccctgacgttagcataaggctgttagaggttgtccagagtgaccagtcacaatctggccttaccttcgcatcaagaggtaccaacatggaggatgaggcggaccaatacttttcacatgatgatccaattagtagtgatcaatccaggttcggatggttcgggaacaaggaaatctcagatattgaagtgcaagaccctgagggattcaacatgattctgggtaccatcctagcccaaatttgggtcttgctcgcaaaggcggttacggccccagacacggcagctgattcggagctaagaaggtggataaagtacacccaacaaagaagggtagttggtgaatttagattggagagaaaatggttggatgtggtgaggaacaggattgccgaggacctctccttacgccgattcatggtcgctctaatcctggatatcaagagaacacccggaaacaaacccaggattgctgaaatgatatgtgacattgatacatatatcgtagaggcaggattagccagttttatcctgactattaagtttgggatagaaactatgtatcctgctcttggactgcatgaatttgctggtgagttatccacacttgagtccttgatgaacctttaccagcaaatgggggaaactgcaccctacatggtaatcctggagaactcaattcagaacaagttcagtgcaggatcataccctctgctctggagctatgccatgggagtaggagtggaacttgaaaactccatgggaggtttgaactttggccgatcttactttgatccagcatattttagattagggcaagagatggtaaggaggtcagctggaaaggtcagttccacattggcatctgaactcggtatcactgccgaggatgcaaggcttgtttcagagattgcaatgcatactactgaggacaagatcagtagagcggttggacccagacaagcccaagtatcatttctacacggtgatcaaagtgagaatgagctaccgagattggggggcaaggaagataggagggtcaaacagagtcgaggagaagccagggagagctacagagaaaccgggcccagcagagcaagtgatgcgagagctgcccatcttccaaccggcacacccctagacattgacactgcaacggagtccagccaagatccgcaggacagtcgaaggtcagctgacgccctgcttaggctgcaagccatggcaggaatctcggaagaacaaggctcagacacggacacccctatagtgtacaatgacagaaatcttctagactaggtgcgagaggccgagggccagaacaacatccgcctaccatccatcattgttataaaaaacttaggaaccaggtccacacagccgccagcccatcaaccatccactcccacgattggagccaatggcagaagagcaggcacgccatgtcaaaaacggactggaatgcatccgggctctcaaggccgagcccatcggctcactggccatcgaggaagctatggcagcatggtcagaaatatcagacaacccaggacaggagcgagccacctgcagggaagagaaggcaggcagttcgggtctcagcaaaccatgcctctcagcaattggatcaactgaaggcggtgcacctcgcatccgcggtcagggacctggagagagcgatgacgacgctgaaactttgggaatccccccaagaaatctccaggcatcaagcactgggttacagtgttattacgtttatgatcacagcggtgaagcggttaagggaatccaagatgctgactctatcatggttcaatcaggccttgatggtgatagcaccctctcaggaggagacaatgaatctgaaaacagcgatgtggatattggcgaacctgataccgagggatatgctatcactgaccggggatctgctcccatctctatggggttcagggcttctgatgttgaaactgcagaaggaggggagatccacgagctcctgagactccaatccagaggcaacaactttccgaagcttgggaaaactctcaatgttcctccgcccccggaccccggtagggccagcacttccgggacacccattaaaaagggcacagacgcgagattagcctcatttggaacggagatcgcgtctttattgacaggtggtgcaacccaatgtgctcgaaagtcaccctcggaaccatcagggccaggtgcacctgcggggaatgtccccgagtgtgtgagcaatgccgcactgatacaggagtggacacccgaatctggtaccacaatctccccgagatcccagaataatgaagaagggggagactattatgatgatgagctgttctctgatgtccaagatattaaaacagccttggccaaaatacacgaggataatcagaagataatctccaagctagaatcactgctgttattgaagggagaagttgagtcaattaagaagcagatcaacaggcaaaatatcagcatatccaccctggaaggacacctctcaagcatcatgatcgccattcctggacttgggaaggatcccaacgaccccactgcagatgtcgaaatcaatcccgacttgaaacccatcataggcagagattcaggccgagcactggccgaagttctcaagaaacccgttgccagccgacaactccaaggaatgacaaatggacggaccagttccagaggacagctgctgaaggaatttcagctaaagccgatcgggaaaaagatgagctcagccgtcgggtttgttcctgacaccggccctgcatcacgcagtgtaatccgctccattataaaatccagccggctagaggaggatcggaagcgttacctgatgactctccttgatgatatcaaaggagccaatgatcttgccaagttccaccagatgctgatgaagataataatgaagtagctacagctcaacttacctgccaaccccatgccagtcgacccaactagtacaacctaaatccattataaaaaacttaggagcaaagtgattgcctcccaaggtccacaatgacagagacctacgacttcgacaagtcggcatgggacatcaaagggtcgatcgctccgatacaacccaccacctacagtgatggcaggctggtgccccaggtcagagtcatagatcctggtctaggcgacaggaaggatgaatgctttatgtacatgtttctgctgggggttgttgaggacagcgattccctagggcctccaatcgggcgagcatttgggttcctgcccttaggtgttggcagatccacagcaaagcccgaaaaactcctcaaagaggccactgagcttgacatagttgttagacgtacagcagggctcaatgaaaaactggtgttctacaacaacaccccactaactctcctcacaccttggagaaaggtcctaacaacagggagtgtcttcaacgcaaaccaagtgtgcaatgcggttaatctgataccgctcgataccccgcagaggttccgtgttgtttatatgagcatcacccgtctttcggataacgggtattacaccgttcctagaagaatgctggaattcagatcggtcaatgcagtggccttcaacctgctggtgacccttaggattgacaaggcgataggccctgggaagatcatcgacaatacagagcaacttcctgaggcaacatttatggtccacatcgggaacttcaggagaaagaagagtgaagtctactctgccgattattgcaaaatgaaaatcgaaaagatgggcctggtttttgcacttggtgggatagggggcaccagtcttcacattagaagcacaggcaaaatgagcaagactctccatgcacaactcgggttcaagaagaccttatgttacccgctgatggatatcaatgaagaccttaatcgattactctggaggagcagatgcaagatagtaagaatccaggcagttttgcagccatcagttcctcaagaattccgcatttacgacgacgtgatcataaatgatgaccaaggactattcaaagttctgtagaccgtagtgcccagcaatgcccgaaaacgacccccctcacaatgacagccagaaggcccggacaaaaaagccccctccgaaagactccacggaccaagcgagaggccagccagcagccgacggcaagcgcgaacaccaggcggccccagcacagaacagccctgacacaaggccaccaccagccaccccaatctgcatcctcctcgtgggacccccgaggaccaacccccaaggctgcccccgatccaaaccaccaaccgcatccccaccacccccgggaaagaaacccccagcaattggaaggcccctccccctcttcctcaacacaagaactccacaaccgaaccgcacaagcgaccgaggtgacccaaccgcaggcatccgactccctagacagatcctctctccccggcaaactaaacaaaacttagggccaaggaacatacacacccaacagaacccagaccccggcccacggcgccgcgcccccaacccccgacaaccagagggagcccccaaccaatcccgccggctcccccggtgcccacaggcagggacaccaacccccgaacagacccagcacccaaccatcgacaatccaagacgggggggcccccccaaaaaaaggcccccaggggccgacagccagcaccgcgaggaagcccacccaccccacacacgaccacggcaaccaaaccagaacccagaccaccctgggccaccagctcccagactcggccatcaccccgcagaaaggaaaggccacaacccgcgcaccccagccccgatccggcggggagccacccaacccgaaccagcacccaagagcgatccccgaaggacccccgaaccgcaaaggacatcagtatcccacagcctctccaagtcccccggtctcctcctcttctcgaagggaccaaaagatcaatccaccacacccgacgacactcaactccccacccctaaaggagacaccgggaatcccagaatcaagactcatccaatgtccatcatgggtctcaaggtgaacgtctctgccatattcatggcagtactgttaactctccaaacacccaccggtcaaatccattggggcaatctctctaagataggggtggtaggaataggaagtgcaagctacaaagttatgactcgttccagccatcaatcattagtcataaaattaatgcccaatataactctcctcaataactgcacgagggtagagattgcagaatacaggagactactgagaacagttttggaaccaattagagatgcacttaatgcaatgacccagaatataagaccggttcagagtgtagcttcaagtaggagacacaagagatttgcgggagtagtcctggcaggtgcggccctaggcgttgccacagctgctcagataacagccggcattgcacttcaccagtccatgctgaactctcaagccatcgacaatctgagagcgagcctggaaactactaatcaggcaattgagacaatcagacaagcagggcaggagatgatattggctgttcagggtgtccaagactacatcaataatgagctgataccgtctatgaaccaactatcttgtgatttaatcggccagaagctcgggctcaaattgctcagatactatacagaaatcctgtcattatttggccccagtttacgggaccccatatctgcggagatatctatccaggctttgagctatgcgcttggaggagacatcaataaggtgttagaaaagctcggatacagtggaggtgatttactgggcatcttagagagcggaggcatcaaggcccggataactcacgtcgacacagagtcctacttcattgtcctcagtatagcctatccgacgctgtccgagattaagggggtgattgtccaccggctagagggggtctcgtacaacataggctctcaagagtggtataccactgtgcccaagtatgttgcaacccaagggtaccttatctcgaattttgatgagtcatcgtgtactttcatgccagaggggactgtgtgcagccaaaatgccttgtacccgatgagtcctctgctccaagaatgcctccgggggtacaccaagtcctgtgctcgtacactcgtatccgggtcttttgggaaccggttcattttatcacaagggaacctaatagccaattgtgcatcaatcctttgcaagtgttacacaacaggaacgatcattaatcaagaccctgacaagatcctaacatacattgctgccgatcactgcccggtagtcgaggtgaacggcgtgaccatccaagtcgggagcaggaggtatccagacgctgtgtacttgcacagaattgacctcggtcctcccatatcattggagaggttggacgtagggacaaatctggggaatgcaattgctaagttggaggatgccaaggaattgttggagtcatcggaccagatattgaggagtatgaaaggtttatcgagcactagcatagtctacatcctgattgcagtgtgtcttggagggttgatagggatccccgctttaatatgttgctgcagggggcgttgtaacaaaaagggagaacaagttggtatgtcaagaccaggcctaaagcctgatcttacgggaacatcaaaatcctatgtaaggtcgctctgatcctctacaactcttgaaacacaaatgtcccacaagtctcctcttcgtcatcaagcaaccaccgcacccagcatcaagcccacctgaaattatctccggcttccctctggccgaacaatatcggtagttaatcaaaacttagggtgcaagatcatccacaatgtcaccacaacgagaccggataaatgccttctacaaagataacccccatcccaagggaagtaggatagtcattaacagagaacatcttatgattgatagaccttatgttttgctggctgttctgtttgtcatgtttctgagcttgatcgggttgctagccattgcaggcattagacttcatcgggcagccatctacaccgcagagatccataaaagcctcagcaccaatctagatgtaactaactcaatcgagcatcaggtcaaggacgtgctgacaccactcttcaaaatcatcggtgatgaagtgggcctgaggacacctcagagattcactgacctagtgaaattaatctctgacaagatcaagttccttaatccggatagggagtacgacttcagagatctcacttggtgtatcaacccgccagagagaatcaaattggattatgatcaatactgtgcagatgtggctgctgaagagctcatgaatgcattggtgaactcaactctactggagaccagaacaaccaatcagttcctagctgtctcaaagggaaactgctcagggcccactacaatcagaggtcaattctcaaacatgtcgctgtccctgttagacttgtatttaggtcgaggttacaatgtgtcatctatagtcactatgacatcccagggaatgtatgggggaacttacctagtggaaaagcctaatctgagcagcaaaaggtcagagttgtcacaactgagcatgtaccgagtgtttgaagtaggtgttatcagaaatccgggtttgggggctccggtgttccatatgacaaactatcttgagcaaccagtcagtaatgatctcagcaactgtatggtggctttgggggagctcaaactcgcagccctttgtcacggggaagattctatcacaattccctatcagggatcagggaaaggtgtcagcttccagctcgtcaagctaggtgtctggaaatccccaaccgacatgcaatcctgggtccccttatcaacggatgatccagtgatagacaggctttacctctcatctcacagaggtgttatcgctgacaatcaagcaaaatgggctgtcccgacaacacgaacagatgacaagttgcgaatggagacatgcttccaacaggcgtgtaagggtaaaatccaagcactctgcgagaatcccgagtgggcaccattgaaggataacaggattccttcatacggggtcttgtctgttgatctgagtctgacagttgagcttaaaatcaaaattgcttcgggattcgggccattgatcacacacggttcagggatggacctatacaaatccaaccacaacaatgtgtattggctgactatcccgccaatgaagaacctagccttaggtgtaatcaacacattggagtggataccgagattcaaggttagtccctacctcttcactgtcccaattaaggaagcaggcgaagactgccatgccccaacatacctacctgcggaggtggatggtgatgtcaaactcagttccaatctggtgattctacctggtcaagatctccaatatgttttggcaacctacgatacttccagggttgaacatgctgtggtttattacgtttacagcccaagccgctcattttcttacttttatccttttaggttgcctataaagggggtccccatcgaattacaagtggaatgcttcacatgggaccaaaaactctggtgccgtcacttctgtgtgcttgcggactcagaatctggtggacatatcactcactctgggatggtgggcatgggagtcagctgcacagtcacccgggaagatggaaccaatcgcagatagggctgctagtgaaccaatcacatgatgtcacccagacatcaggcatacccactagtctaccctccatcattgttataaaaaacttaggaaccaggtccacacagccgccagcccatcaacgcgtacggccaccatgggtagacttacaagtggggtgggaactgccgcacttttggttgttgctgtgggcttgcgagtggtttgcgctaaatacgcactcgccgatccgtccctcaaaatggcagaccccaatcggtttcggggcaagaatttgccagtccttgaccagctgacagaccctccaggggttaagagagtgtatcacatccagccctcccttgaggaccccttccaacccccatctataccgatcaccgtgtattacgccgtgctcgaacgcgcttgcaggtctgtgttgctgcacgcaccatctgaggctccccagattgttagaggggcaagcgacgaagcgagaaagcacacttacaacctcaccatagcttggtaccgcatgggcgacaactgcgccatcccaatcactgttatggaatatactgagtgcccttacaataaatctctgggtgtgtgtcctattaggacacagcctcgctggagctactatgactccttctctgccgtgagtgaagataatttgggtttcctgatgcacgcacccgcctttgagacagcaggtacgtaccttaggcttgtaaaaatcaacgattggaccgagataacccagtttattctggagcacagggctagagcatcctgtaaatacgcgttgccactccggataccaccagccgcttgcttgacctccaaggcttatcaacagggcgtaacggtggattccatcggcatgctccctaggttcatccctgaaaatcaaagaacggtggcactgtattcactcaagattgccggctggcacggccctaagccaccatacacctctactctgctgcccccggagctgagtgataccactaacgcaacccagcctgaactggtgccagaggatcctgaagattctgcattgctggaagacccagccggcactgtgtctagtcaaattccccctaattggcacataccgagcattcaggacgttgctccacaccacgctccggctgctccaagcaatcctggcctgataataggtgcattggccggttctaccctcgccgtcctggtgattgggggtatcgccttctgggttaggaggagagctcaaatggcccccaagcgcttgaggttgccgcacataagagacgacgacgcccccccttctcaccagcctctgttttattagttcgaactacagctcaacttacctgccaaccccatgccagtcgacccaactagtacaacctaaatccattataaaaaacttaggaaccaggtccacacagccgccagcccatcaaccatccactcccacgattggaggccggccatgaggggaggaggccttgtctgtgcacttgttgtaggagctttggtcgccgccgtagctagtgcagctccagcagcaccaagggcttcaggaggggttgcagctactgttgctgctaacggaggacctgctagccaaccacctccggtgccttctccggctactaccaaagcccgcaagcgaaaaacaaagaagcccccaaagaggccagaggccacacctccacccgacgctaacgctactgtggcggctggacacgctactttgagagcccacctgcgggaaatcaaggttgagaacgcagacgcacaattctacgtttgtcccccccctacaggtgcaacagtcgtgcagtttgagcagccaagacgctgtcctactaggcctgagggacaaaattacaccgagggtatcgccgtagtttttaaggagaatatcgcaccctataagtttaaagcgacaatgtactataaggatgtgaccgtcagccaagtctggtttggtcaccgatacagtcagtttatgggaatctttgaggaccgggccccggtccctttcgaagaagtgatcgacaagattaacgccaagggagtgtgcaggtcaaccgcaaagtacgtccgaaacaatatggaaacaaccgccttccacagggacgaccacgaaacagatatggagcttaagccggctaaagtggccactcgcacgtcaagaggttggcataccacggacctgaaatataacccttctagagttgaagctttccaccggtatgggaccacggtgaactgtattgtggaagaagtggacgccagatccgtgtacccctacgacgaattcgttcttgctacaggcgatttcgtgtatatgtctcctttctacggctacagggagggctcccacaccgagcacacctcctacgccgcagatagatttaaacaggtggacggcttctacgctcgcgatctgactactaaggcacgggcaacaagcccaacaactcgcaatttgctgaccacaccaaagtttactgtggcctgggactgggtacccaagaggcctgctgtttgcacaatgaccaaatggcaggaggttgacgagatgctccgggccgaatatggaggatcctttagattctcttctgacgctatcagtaccaccttcaccacaaatctgactcagtactctctgtctcgcgtagatctgggagactgtatcggtagggacgcacgcgaggctatagatcggatgttcgcccggaaatacaacgccacccacattaaagtggggcagccccagtattacttggctactgggggcttccttatcgcttatcagcctctgctctcaaataccctggcggagctttatgtacgcgagtatatgagggagcaggacaggaagccacgcaacgctaccccagcacccctgagagaagcgccttctgccaacgcgagtgtggaacgaattaagaccacgtcttcaatcgaattcgctcggctccaatttacctacaaccacattcaacgccacgttaacgatatgctgggaaggattgcagttgcttggtgtgagctccagaaccacgaactgacactgtggaacgaggccagaaagcttaacccaaacgctattgcttccgcgacagttggaagaagagtgtctgcacgaatgctcggcgacgttatggctgttagtacctgtgtgcctgtggcccctgacaatgtaattgttcagaacagtatgagagtctcttctagacccggcacttgctactccaggccactggtctcttttcgctacgaggatcaggggcctttgatcgagggccagttgggagagaataacgaactgcgcctgaccagagacgctctggaaccctgtacagtcggccacagacgatattttatattcggcggcggttacgtatattttgaagagtatgcgtactcccaccaactgtccagagcagatgtgaccactgtgagcacttttatcgatctcaatatcactatgctggaggatcacgagtttgttccgttggaagtgtacactcggcacgagatcaaggacagtggcctgctcgattataccgaagtccagaggcgcaatcaactgcacgatctgagatttgccgatattgacacagtgattagggctgacgctaacgccgctatgtttgctggcctgtgtgcctttttcgagggaatgggtgatctcggaagagccgtaggcaaggtggttatgggagtcgtaggtggcgtcgttagtgccgtgtcaggggtgtctagctttatgtctaaccccttcggagctttggctgtgggtctcctggtacttgccggactggtggccgcattttttgcctttaggtacgtcctgcagctgcagaggaatccaatgaaggccctgtatccacttacaacaaaggaacttaaaacctccgatcctggaggagttggaggagaaggcgaagagggagcggaaggtggtgggtttgacgaggccaagttggctgaggcccgagagatgataaggtatatggctctcgtatctgcaatggagagaactgagcacaaagctcgcaagaagggaaccagtgccctgctgagcagcaaagtgacaaatatggtgcttcgaaaacgcaataaggctcgctactctcctctgcacaacgaggacgaagcaggggatgaggacgaactctgactattcgaactactcagctagtctacgcgccgtagcctaccctccatcattgttataaaaaacttaggagcaaagtccacacagccgccgataaggtccacaatggcattgggtagagttggtttggctgtgggactttggggtctcctctgggtcggtgtggttgtcgtactggctaacgcttctccaggccgcactattactgttggaccgagagggaacgcttccaacgctgctccctctgcctcccctaggaacgcttctgctcctagaactacacctactccaccgcaaccccgcaaagcaaccaaaagcaaggcctcaaccgctaaaccagctcctccaccgaagacaggcccacctaaaaccagcagcgagcccgtgcggtgtaatcgacacgatcccctggcccgatacggtagtcgggtgcaaatccgctgtaggtttcctaatagtactagaacagaaagcaggctgcagatctggagatacgccactgccactgacgcagaaatcgggaccgccccttcccttgaggaggtgatggtgaacgtaagcgctccaccaggaggtcagctcgtctacgactcagcacccaataggaccgatccacacgtgatttgggcagaaggagctggaccaggcgcctctccaaggttgtattccgttgtaggcccactgggtcggcagagactgattatcgaagaactgactctggaaacccagggaatgtactattgggtttggggaaggactgataggcctagtgcttacggtacttgggtgagagtcagggtatttcggcctccttccctgactatacacccacacgcagtgctcgagggtcagcctttcaaggccacttgcacagccgcaacttactaccctgggaaccgagcagagtttgtgtggtttgaagacgggcggagagtttttgaccccgcacagatccacacgcagacccaggaaaaccctgacggattctccaccgttagcactgtgacctctgccgcagttggaggacaaggaccgccaaggaccttcacctgtcagctgacctggcaccgcgactctgtttcagcgtctagacggaacgcgagcggtactgcctctgtgctccccagacccacaatcacaatggagttcaccggcgatcacgccgtgtgtacggctggttgtgtacccgaaggcgtgacctttgcttggtttttgggagacgatagctcacctgccgagaaagtcgcagtggcttcacaaacttcctgcggaaggcccgggactgccactatccgatctacgctccccgtgtcttacgagcagacagaatatatttgccgactggcaggatatccagacggaatacccgtcctggaacaccacggttctcaccagcctccaccgagagatccaaccgagcgacaggtaatcagagccgtggaaggagcgggtattggcgtggcagttctcgttgctgtcgtacttgccggcacggctgttgtgtatctcactcacgccagcagcgtgcgatacaggcgcctcagatgataagcgcgcagcgcttagacgtctcgcgatcgatgctagtgtgaaatagacatcagaattaagaaaaacgtagggtccaagtggttccccgttatggactcgctatctgtcaaccagatcttataccctgaagttcacctagatagcccgatagttaccaataagatagtagccatcctggagtatgctcgagtccctcacgcttacagcctggaggaccctacactgtgtcagaacatcaagcaccgcctaaaaaacggattttccaaccaaatgattataaacaatgtggaagttgggaatgtcatcaagtccaagcttaggagttatccggcccactctcatattccatatccaaattgtaatcaggatttatttaacatagaagacaaagagtcaacgaggaagatccgtgaactcctcaaaaaggggaattcgctgtactccaaagtcagtgataaggttttccaatgcttaagggacactaactcacggcttggcctaggctccgaattgagggaggacatcaaggagaaagttattaacttgggagtttacatgcacagctcccagtggtttgagccctttctgttttggtttacagtcaagactgagatgaggtcagtgattaaatcacaaacccatacttgccataggaggagacacacacctgtattcttcactggtagttcagttgagttgctaatctctcgtgaccttgttgctataatcagtaaagagtctcaacatgtatattacctgacatttgaactggttttgatgtattgtgatgtcatagaggggaggttaatgacagagaccgctatgactattgatgctaggtatacagagcttctaggaagagtcagatacatgtggaaactgatagatggtttcttccctgcactcgggaatccaacttatcaaattgtagccatgctggagcctctttcacttgcttacctgcagctgagggatataacagtagaactcagaggtgctttccttaaccactgctttactgaaatacatgatgttcttgaccaaaacgggttttctgatgaaggtacttatcatgagttaactgaagctctagattacattttcataactgatgacatacatctgacaggggagattttctcatttttcagaagtttcggccaccccagacttgaagcagtaacggctgctgaaaatgttaggaaatacatgaatcagcctaaagtcattgtgtatgagactctgatgaaaggtcatgccatattttgtggaatcataatcaacggctatcgtgacaggcacggaggcagttggccaccgctgaccctccccctgcatgctgcagacacaatccggaatgctcaagcttcaggtgaagggttaacacatgagcagtgcgttgataactggaaatcttttgctggagtgaaatttggctgctttatgcctcttagcctggatagtgatctgacaatgtacctaaaggacaaggcacttgctgctctccaaagggaatgggattcagtttacccgaaagagttcctgcgttacgaccctcccaagggaaccgggtcacggaggcttgtagatgttttccttaatgattcgagctttgacccatatgatgtgataatgtatgttgtaagtggagcttacctccatgaccctgagttcaacctgtcttacagcctgaaagaaaaggagatcaaggaaacaggtagactttttgctaaaatgacttacaaaatgagggcatgccaagtgattgctgaaaatctaatctcaaacgggattggcaaatattttaaggacaatgggatggccaaggatgagcacgatttgactaaggcactccacactctagctgtctcaggagtccccaaagatctcaaagaaagtcacaggggggggccagtcttaaaaacctactcccgaagcccagtccacacaagtaccaggaacgtgagagcagcaaaagggtttatagggttccctcaagtaattcggcaggaccaagacactgatcatccggagaatatggaagcttacgagacagtcagtgcatttatcacgactgatctcaagaagtactgccttaattggagatatgagaccatcagcttgtttgcacagaggctaaatgagatttacggattgccctcatttttccagtggctgcataagaggcttgagacctctgtcctgtatgtaagtgaccctcattgcccccccgaccttgacgcccatatcccgttatataaagtccccaatgatcaaatcttcattaagtaccctatgggaggtatagaagggtattgtcagaagctgtggaccatcagcaccattccctatctatacctggctgcttatgagagcggagtaaggattgcttcgttagtgcaaggggacaatcagaccatagccgtaacaaaaagggtacccagcacatggccctacaaccttaagaaacgggaagctgctagagtaactagagattactttgtaattcttaggcaaaggctacatgatattggccatcacctcaaggcaaatgagacaattgtttcatcacatttttttgtctattcaaaaggaatatattatgatgggctacttgtgtcccaatcactcaagagcatcgcaagatgtgtattctggtcagagactatagttgatgaaacaagggcagcatgcagtaatattgctacaacaatggctaaaagcatcgagagaggttatgaccgttaccttgcatattccctgaacgtcctaaaagtgatacagcaaattctgatctctcttggcttcacaatcaattcaaccatgacccgggatgtagtcatacccctcctcacaaacaacgacctcttaataaggatggcactgttgcccgctcctattggggggatgaattatctgaatatgagcaggctgtttgtcagaaacatcggtgatccagtaacatcatcaattgctgatctcaagagaatgattctcgcctcactaatgcctgaagagaccctccatcaagtaatgacacaacaaccgggggactcttcattcctagactgggctagcgacccttactcagcaaatcttgtatgtgtccagagcatcactagactcctcaagaacataactgcaaggtttgtcctgatccatagtccaaacccaatgttaaaaggattattccatgatgacagtaaagaagaggacgagggactggcggcattcctcatggacaggcatattatagtacctagggcagctcatgaaatcctggatcatagtgtcacaggggcaagagagtctattgcaggcatgctggataccacaaaaggcttgattcgagccagcatgaggaagggggggttaacctctcgagtgataaccagattgtccaattatgactatgaacaattcagagcagggatggtgctattgacaggaagaaagagaaatgtcctcattgacaaagagtcatgttcagtgcagctggcgagagctctaagaagccatatgtgggcgaggctagctcgaggacggcctatttacggccttgaggtccctgatgtactagaatctatgcgaggccaccttattcggcgtcatgagacatgtgtcatctgcgagtgtggatcagtcaactacggatggttttttgtcccctcgggttgccaactggatgatattgacaaggaaacatcatccttgagagtcccatatattggttctaccactgatgagagaacagacatgaagcttgccttcgtaagagccccaagtcgatccttgcgatctgctgttagaatagcaacagtgtactcatgggcttacggtgatgatgatagctcttggaacgaagcctggttgttggctaggcaaagggccaatgtgagcctggaggagctaagggtgatcactcccatctcaacttcgactaatttagcgcataggttgagggatcgtagcactcaagtgaaatactcaggtacatcccttgtccgagtggcgaggtataccacaatctccaacgacaatctctcatttgtcatatcagataagaaggttgatactaactttatataccaacaaggaatgcttctagggttgggtgttttagaaacattgtttcgactcgagaaagataccggatcatctaacacggtattacatcttcacgtcgaaacagattgttgcgtgatcccgatgatagatcatcccaggatacccagctcccgcaagctagagctgagggcagagctatgtaccaacccattgatatatgataatgcacctttaattgacagagatgcaacaaggctatacacccagagccataggaggcaccttgtggaatttgttacatggtccacaccccaactatatcacattttagctaagtccacagcactatctatgattgacctggtaacaaaatttgagaaggaccatatgaatgaaatttcagctctcataggggatgacgatatcaatagtttcataactgagtttctgctcatagagccaagattattcactatctacttgggccagtgtgcggccatcaattgggcatttgatgtacattatcatagaccatcagggaaatatcagatgggtgagctgttgtcatcgttcctttctagaatgagcaaaggagtgtttaaggtgcttgtcaatgctctaagccacccaaagatctacaagaaattctggcattgtggtattatagagcctatccatggtccttcacttgatgctcaaaacttgcacacaactgtgtgcaacatggtttacacatgctatatgacctacctcgacctgttgttgaatgaagagttagaagagttcacatttctcttgtgtgaaagcgacgaggatgtagtaccggacagattcgacaacatccaggcaaaacacttatgtgttctggcagatttgtactgtcaaccagggacctgcccaccaattcgaggtctaagaccggtagagaaatgtgcagttctaaccgaccatatcaaggcagaggctatgttatctccagcaggatcttcgtggaacataaatccaattattgtagaccattactcatgctctctgacttatctccggcgaggatcgatcaaacagataagattgagagttgatccaggattcattttcgacgccctcgctgaggtaaatgtcagtcagccaaagatcggcagcaacaacatctcaaatatgagcatcaaggctttcagacccccacacgatgatgttgcaaaattgctcaaagatatcaacacaagcaagcacaatcttcccatttcagggggcaatctcgccaattatgaaatccatgctttccgcagaatcgggttgaactcatctgcttgctacaaagctgttgagatatcaacattaattaggagatgccttgagccaggggaggacggcttgttcttgggtgagggatcgggttctatgttgatcacttataaagagatacttaaactaaacaagtgcttctataatagtggggtttccgccaattctagatctggtcaaagggaattagcaccctatccctccgaagttggccttgtcgaacacagaatgggagtaggtaatattgtcaaagtgctctttaacgggaggcccgaagtcacgtgggtaggcagtgtagattgcttcaatttcatagttagtaatatccctacctctagtgtggggtttatccattcagatatagagaccttgcctgacaaagatactatagagaagctagaggaattggcagccatcttatcgatggctctgctcctgggcaaaataggatcaatactggtgattaagcttatgcctttcagcggggattttgttcagggatttataagttatgtagggtctcattatagagaagtgaaccttgtataccctagatacagcaacttcatctctactgaatcttatttggttatgacagatctcaaggctaaccggctaatgaatcctgaaaagattaagcagcagataattgaatcatctgtgaggacttcacctggacttataggtcacatcctatccattaagcaactaagctgcatacaagcaattgtgggagacgcagttagtagaggtgatatcaatcctactctgaaaaaacttacacctatagagcaggtgctgatcaattgcgggttggcaattaacggacctaagctgtgcaaagaattgatccaccatgatgttgcctcagggcaagatggattgcttaattctatactcatcctctacagggagttggcaagattcaaagacaaccaaagaagtcaacaagggatgttccacgcttaccccgtattggtaagtagcaggcaacgagaacttatatctaggatcacccgcaaattctgggggcacattcttctttactccgggaacaaaaagttgataaataagtttatccagaatctcaagtccggctatctgatactagacttacaccagaatatcttcgttaagaatctatccaagtcagagaaacagattattatgacggggggtttgaaacgtgagtgggtttttaaggtaacagtcaaggagaccaaagaatggtataagttagtcggatacagtgccctgattaaggactaattggttgaactccggaaccctaatcctgccctaggtggttaggcattatttgcaatatattaaagaaaactttgaaaatacgaagtttctattcccagctttgtctggtggccggcatggtcccagcctcctcgctggcgccggctgggcaacattccgaggggaccgtcccctcggtaatggcgaatgggacgcggccggtcgatcgacgatccggctgctaacaaagcccgaaaggaagctgagttggctgctgccaccgctgagcaataactagcataaccccttggggcctctaaacgggtcttgaggggttttttgctgaaaggaggaactatatccggatcgagatcaattctgtgagcgtatggcaaacgaaggaaaaatagttatagtagccgcactcgatgggacatttcaacgtaaaccgtttaataatattttgaatcttattccattatctgaaatggtggtaaaactaactgctgtgtgtatgaaatgctttaaggaggcttccttttctaaacgattgggtgaggaaaccgagatagaaataataggaggtaatgatatgtatcaatcggtgtgtagaaagtgttacatcgactcataatattatattttttatctaaaaaactaaaaataaacattgattaaattttaatataatacttaaaaatggatgttgtgtcgttagataaaccgtttatgtattttgaggaaattgataatgagttagattacgaaccagaaagtgcaaatgaggtcgcaaaaaaactgccgtatcaaggacagttaaaactattactaggagaattattttttcttagtaagttacagcgacacggtatattagatggtgccaccgtagtgtatataggatctgctcccggtacacatatacgttatttgagagatcatttctataatttaggagtgatcccgaaaggaagctgagttggctgctgccaccgctgagcaataactagcataaccccttggggcctctaaacgggtcttgaggggttttttgctgaaaggaggaacgcgcctgatgcggtattttctccttacgcatctgtgcggtatttcacaccgcatatatggtgcactctcagtacaatctgctctgatgccgcatagttaagccagccccgacacccgccaacacccgctgacgcgccctgacgggcttgtctgctcccggcatccgcttacagacaagctgtgaccgtctccgggagctgcatgtgtcagaggttttcaccgtcatcaccgaaacgcgcgagacgaaagggcctcgtgatacgcctatttttataggttaatgtcatgataataatggtttcttagacgtcaggtggcacttttcggggaaatgtgcgcggaacccctatttgtttatttttctaaatacattcaaatatgtatccgctcatgagacaataaccctgataaatgcttcaataatattgaaaaaggaagagtatgagtattcaacatttccgtgtcgcccttattcccttttttgcggcattttgccttcctgtttttgctcacccagaaacgctggtgaaagtaaaagatgctgaagatcagttgggtgcacgagtgggttacatcgaactggatctcaacagcggtaagatccttgagagttttcgccccgaagaacgttttccaatgatgagcacttttaaagttctgctatgtggcgcggtattatcccgtattgacgccgggcaagagcaactcggtcgccgcatacactattctcagaatgacttggttgagtactcaccagtcacagaaaagcatcttacggatggcatgacagtaagagaattatgcagtgctgccataaccatgagtgataacactgcggccaacttacttctgacaacgatcggaggaccgaaggagctaaccgcttttttgcacaacatgggggatcatgtaactcgccttgatcgttgggaaccggagctgaatgaagccataccaaacgacgagcgtgacaccacgatgcctgtagcaatggcaacaacgttgcgcaaactattaactggcgaactacttactctagcttcccggcaacaattaatagactggatggaggcggataaagttgcaggaccacttctgcgctcggcccttccggctggctggtttattgctgataaatctggagccggtgagcgtgggtctcgcggtatcattgcagcactggggccagatggtaagccctcccgtatcgtagttatctacacgacggggagtcaggcaactatggatgaacgaaatagacagatcgctgagataggtgcctcactgattaagcattggtaactgtcagaccaagtttactcatatatactttagattgatttaaaacttcatttttaatttaaaaggatctaggtgaagatcctttttgataatctcatgaccaaaatcccttaacgtgagttttcgttccactgagcgtcagaccccgtagaaaagatcaaaggatcttcttgagatcctttttttctgcgcgtaatctgctgcttgcaaacaaaaaaaccaccgctaccagcggtggtttgtttgccggatcaagagctaccaactctttttccgaaggtaactggcttcagcagagcgcagataccaaatactgtccttctagtgtagccgtagttaggccaccacttcaagaactctgtagcaccgcctacatacctcgctctgctaatcctgttaccagtggctgctgccagtggcgataagtcgtgtcttaccgggttggactcaagacgatagttaccggataaggcgcagcggtcgggctgaacggggggttcgtgcacacagcccagcttggagcgaacgacctacaccgaactgagatacctacagcgtgagcattgagaaagcgccacgcttcccgaagggagaaaggcggacaggtatccggtaagcggcagggtcggaacaggagagcgcacgagggagcttccagggggaaacgcctggtatctttatagtcctgtcgggtttcgccacctctgacttgagcgtcgatttttgtgatgctcgtcaggggggcggagcctatggaaaaacgccagcaacgcggcctttttacggttcctggccttttgctggccttttgctcacatgttctttcctgcgttatcccctgattctgtggataaccgtattaccgcctttgagtgagctgataccgctcgccgcagccgaacgaccgagcgcagcgagtcagtgagcgaggaagcggaagagcgcccaatacgcaaaccgcctctccccgcgcgttggccgattcattaatgcagctggcacgacaggtttcccgactggaaagcgggcagtgagcgcaacgcaattaatgtgagttagctcactcattaggcaccccaggctttacactttatgcttccggctcgtatgttgtgtggaattgtgagcggataacaatttcacacaggaaacagctatgaccatgattacgccaagcttacgcgtcctggcattatgcccagtacatgaccttatgggactttcctacttggcagtacatctacgtattagtcatcgctattaccatggtgatgcggttttggcagtacatcaatgggcgtggatagcggtttgactcacggggatttccaagtctccaccccattgacgtcaatgggagtttgttttggcaccaaaatcaacgggactttccaaaatgtcgtaacaactccgccccattgacgcaaatgggcggtaggcgtgtacggtgggaggtctatataagcagagctcgtttagtgaaccgtgg

SEQ ID NO: 82 - DNA, 21468 bp, synthetic construct
  source 1..21468: mol_type = other DNA
accaaacaaagttgggtaaggatagttcaatcaatgatcatcttctagtgcacttaggattcaagatcctattatcagggacaagagcaggattagggatatccgagatggccacacttttaaggagcttagcattgttcaaaagaaacaaggacaaaccacccattacatcaggatccggtggagccatcagaggaatcaaacacattattatagtaccaatccctggagattcctcaattaccactcgatccagacttctggaccggttggtgaggttaattggaaacccggatgtgagcgggcccaaactaacaggggcactaataggtatattatccttatttgtggagtctccaggtcaattgattcagaggatcaccgatgaccctgacgttagcataaggctgttagaggttgtccagagtgaccagtcacaatctggccttaccttcgcatcaagaggtaccaacatggaggatgaggcggaccaatacttttcacatgatgatccaattagtagtgatcaatccaggttcggatggttcgggaacaaggaaatctcagatattgaagtgcaagaccctgagggattcaacatgattctgggtaccatcctagcccaaatttgggtcttgctcgcaaaggcggttacggccccagacacggcagctgattcggagctaagaaggtggataaagtacacccaacaaagaagggtagttggtgaatttagattggagagaaaatggttggatgtggtgaggaacaggattgccgaggacctctccttacgccgattcatggtcgctctaatcctggatatcaagagaacacccggaaacaaacccaggattgctgaaatgatatgtgacattgatacatatatcgtagaggcaggattagccagttttatcctgactattaagtttgggatagaaactatgtatcctgctcttggactgcatgaatttgctggtgagttatccacacttgagtccttgatgaacctttaccagcaaatgggggaaactgcaccctacatggtaatcctggagaactcaattcagaacaagttcagtgcaggatcataccctctgctctggagctatgccatgggagtaggagtggaacttgaaaactccatgggaggtttgaactttggccgatcttactttgatccagcatattttagattagggcaagagatggtaaggaggtcagctggaaaggtcagttccacattggcatctgaactcggtatcactgccgaggatgcaaggcttgtttcagagattgcaatgcatactactgaggacaagatcagtagagcggttggacccagacaagcccaagtatcatttctacacggtgatcaaagtgagaatgagctaccgagattggggggcaaggaagataggagggtcaaacagagtcgaggagaagccagggagagctacagagaaaccgggcccagcagagcaagtgatgcgagagctgcccatcttccaaccggcacacccctagacattgacactgcaacggagtccagccaagatccgcaggacagtcgaaggtcagctgacgccctgcttaggctgcaagccatggcaggaatctcggaagaacaaggctcagacacggacacccctatagtgtacaatgacagaaatcttctagactaggtgcgagaggccgagggccagaacaacatccgcctaccatccatcattgttataaaaaacttaggaaccaggtccacacagccgccagcccatcaaccatccactcccacgattggagccaatggcagaagagcaggcacgccatgtcaaaaacggactggaatgcatccgggctctcaaggccgagcccatcggctcactggccatcgaggaagctatggcagcatggtcagaaatatcagacaacccaggacaggagcgagccacctgcagggaagagaaggcaggcagttcgggtctcagcaaaccatgcctctcagcaattggatcaactgaaggcggtgcacctcgcatccgcggtcagggacctggagagagcgatgacgacgctgaaactttgggaatccccccaagaaatctccaggcatcaagcactgggttacagtgttattacgtttatgatcacagcggtgaagcggttaagggaatccaagatgctgactctatcatggttcaatcaggccttgatggtgatagcaccctctcaggaggagacaatgaatctgaaaacagcgatgtggatattggcgaacctgataccgagggatatgctatcactgaccggggatctgctcccatctctatggggttcagggcttctgatgttgaaactgcagaaggaggggagatccacgagctcctgagactccaatccagaggcaacaactttccgaagcttgggaaaactctcaatgttcctccgcccccggaccccggtagggccagcacttccgggacacccattaaaaagggcacagacgcgagattagcctcatttggaacggagatcgcgtctttattgacaggtggtgcaacccaatgtgctcgaaagtcaccctcggaaccatcagggccaggtgcacctgcggggaatgtccccgagtgtgtgagcaatgccgcactgatacaggagtggacacccgaatctggtaccacaatctccccgagatcccagaataatgaagaagggggagactattatgatgatgagctgttctctgatgtccaagatattaaaacagccttggccaaaatacacgaggataatcagaagataatctccaagctagaatcactgctgttattgaagggagaagttgagtcaattaagaagcagatcaacaggcaaaatatcagcatatccaccctggaaggacacctctcaagcatcatgatcgccattcctggacttgggaaggatcccaacgaccccactgcagatgtcgaaatcaatcccgacttgaaacccatcataggcagagattcaggccgagcactggccgaagttctcaagaaacccgttgccagccgacaactccaaggaatgacaaatggacggaccagttccagaggacagctgctgaaggaatttcagctaaagccgatcgggaaaaagatgagctcagccgtcgggtttgttcctgacaccggccctgcatcacgcagtgtaatccgctccattataaaatccagccggctagaggaggatcggaagcgttacctgatgactctccttgatgatatcaaaggagccaatgatcttgccaagttccaccagatgctgatgaagataataatgaagtagctacagctcaacttacctgccaaccccatgccagtcgacccaactagtacaacctaaatccattataaaaaacttaggagcaaagtgattgcctcccaaggtccacaatgacagagacctacgacttcgacaagtcggcatgggacatcaaagggtcgatcgctccgatacaacccaccacctacagtgatggcaggctggtgccccaggtcagagtcatagatcctggtctaggcgacaggaaggatgaatgctttatgtacatgtttctgctgggggttgttgaggacagcgattccctagggcctccaatcgggcgagcatttgggttcctgcccttaggtgttggcagatccacagcaaagcccgaaaaactcctcaaagaggccactgagcttgacatagttgttagacgtacagcagggctcaatgaaaaactggtgttctacaacaacaccccactaactctcctcacaccttggagaaaggtcctaacaacagggagtgtcttcaacgcaaaccaagtgtgcaatgcggttaatctgataccgctcgataccccgcagaggttccgtgttgtttatatgagcatcacccgtctttcggataacgggtattacaccgttcctagaagaatgctggaattcagatcggtcaatgcagtggccttcaacctgctggtgacccttaggattgacaaggcgataggccctgggaagatcatcgacaatacagagcaacttcctgaggcaacatttatggtccacatcgggaacttcaggagaaagaagagtgaagtctactctgccgattattgcaaaatgaaaatcgaaaagatgggcctggtttttgcacttggtgggatagggggcaccagtcttcacattagaagcacaggcaaaatgagcaagactctccatgcacaactcgggttcaagaagaccttatgttacccgctgatggatatcaatgaagaccttaatcgattactctggaggagcagatgcaagatagtaagaatccaggcagttttgcagccatcagttcctcaagaattccgcatttacgacgacgtgatcataaatgatgaccaaggactattcaaagttctgtagaccgtagtgcccagcaatgcccgaaaacgacccccctcacaatgacagccagaaggcccggacaaaaaagccccctccgaaagactccacggaccaagcgagaggccagccagcagccgacggcaagcgcgaacaccaggcggccccagcacagaacagccctgacacaaggccaccaccagccaccccaatctgcatcctcctcgtgggacccccgaggaccaacccccaaggctgcccccgatccaaaccaccaaccgcatccccaccacccccgggaaagaaacccccagcaattggaaggcccctccccctcttcctcaacacaagaactccacaaccgaaccgcacaagcgaccgaggtgacccaaccgcaggcatccgactccctagacagatcctctctccccggcaaactaaacaaaacttagggccaaggaacatacacacccaacagaacccagaccccggcccacggcgccgcgcccccaacccccgacaaccagagggagcccccaaccaatcccgccggctcccccggtgcccacaggcagggacaccaacccccgaacagacccagcacccaaccatcgacaatccaagacgggggggcccccccaaaaaaaggcccccaggggccgacagccagcaccgcgaggaagcccacccaccccacacacgaccacggcaaccaaaccagaacccagaccaccctgggccaccagctcccagactcggccatcaccccgcagaaaggaaaggccacaacccgcgcaccccagccccgatccggcggggagccacccaacccgaaccagcacccaagagcgatccccgaaggacccccgaaccgcaaaggacatcagtatcccacagcctctccaagtcccccggtctcctcctcttctcgaagggaccaaaagatcaatccaccacacccgacgacactcaactccccacccctaaaggagacaccgggaatcccagaatcaagactcatccaatgtccatcatgggtctcaaggtgaacgtctctgccatattcatggcagtactgttaactctccaaacacccaccggtcaaatccattggggcaatctctctaagataggggtggtaggaataggaagtgcaagctacaaagttatgactcgttccagccatcaatcattagtcataaaattaatgcccaatataactctcctcaataactgcacgagggtagagattgcagaatacaggagactactgagaacagttttggaaccaattagagatgcacttaatgcaatgacccagaatataagaccggttcagagtgtagcttcaagtaggagacacaagagatttgcgggagtagtcctggcaggtgcggccctaggcgttgccacagctgctcagataacagccggcattgcacttcaccagtccatgctgaactctcaagccatcgacaatctgagagcgagcctggaaactactaatcaggcaattgagacaatcagacaagcagggcaggagatgatattggctgttcagggtgtccaagactacatcaataatgagctgataccgtctatgaaccaactatcttgtgatttaatcggccagaagctcgggctcaaattgctcagatactatacagaaatcctgtcattatttggccccagtttacgggaccccatatctgcggagatatctatccaggctttgagctatgcgcttggaggagacatcaataaggtgttagaaaagctcggatacagtggaggtgatttactgggcatcttagagagcggaggcatcaaggcccggataactcacgtcgacacagagtcctacttcattgtcctcagtatagcctatccgacgctgtccgagattaagggggtgattgtccaccggctagagggggtctcgtacaacataggctctcaagagtggtataccactgtgcccaagtatgttgcaacccaagggtaccttatctcgaattttgatgagtcatcgtgtactttcatgccagaggggactgtgtgcagccaaaatgccttgtacccgatgagtcctctgctccaagaatgcctccgggggtacaccaagtcctgtgctcgtacactcgtatccgggtcttttgggaaccggttcattttatcacaagggaacctaatagccaattgtgcatcaatcctttgcaagtgttacacaacaggaacgatcattaatcaagaccctgacaagatcctaacatacattgctgccgatcactgcccggtagtcgaggtgaacggcgtgaccatccaagtcgggagcaggaggtatccagacgctgtgtacttgcacagaattgacctcggtcctcccatatcattggagaggttggacgtagggacaaatctggggaatgcaattgctaagttggaggatgccaaggaattgttggagtcatcggaccagatattgaggagtatgaaaggtttatcgagcactagcatagtctacatcctgattgcagtgtgtcttggagggttgatagggatccccgctttaatatgttgctgcagggggcgttgtaacaaaaagggagaacaagttggtatgtcaagaccaggcctaaagcctgatcttacgggaacatcaaaatcctatgtaaggtcgctctgatcctctacaactcttgaaacacaaatgtcccacaagtctcctcttcgtcatcaagcaaccaccgcacccagcatcaagcccacctgaaattatctccggcttccctctggccgaacaatatcggtagttaatcaaaacttagggtgcaagatcatccacaatgtcaccacaacgagaccggataaatgccttctacaaagataacccccatcccaagggaagtaggatagtcattaacagagaacatcttatgattgatagaccttatgttttgctggctgttctgtttgtcatgtttctgagcttgatcgggttgctagccattgcaggcattagacttcatcgggcagccatctacaccgcagagatccataaaagcctcagcaccaatctagatgtaactaactcaatcgagcatcaggtcaaggacgtgctgacaccactcttcaaaatcatcggtgatgaagtgggcctgaggacacctcagagattcactgacctagtgaaattaatctctgacaagatcaagttccttaatccggatagggagtacgacttcagagatctcacttggtgtatcaacccgccagagagaatcaaattggattatgatcaatactgtgcagatgtggctgctgaagagctcatgaatgcattggtgaactcaactctactggagaccagaacaaccaatcagttcctagctgtctcaaagggaaactgctcagggcccactacaatcagaggtcaattctcaaacatgtcgctgtccctgttagacttgtatttaggtcgaggttacaatgtgtcatctatagtcactatgacatcccagggaatgtatgggggaacttacctagtggaaaagcctaatctgagcagcaaaaggtcagagttgtcacaactgagcatgtaccgagtgtttgaagtaggtgttatcagaaatccgggtttgggggctccggtgttccatatgacaaactatcttgagcaaccagtcagtaatgatctcagcaactgtatggtggctttgggggagctcaaactcgcagccctttgtcacggggaagattctatcacaattccctatcagggatcagggaaaggtgtcagcttccagctcgtcaagctaggtgtctggaaatccccaaccgacatgcaatcctgggtccccttatcaacggatgatccagtgatagacaggctttacctctcatctcacagaggtgttatcgctgacaatcaagcaaaatgggctgtcccgacaacacgaacagatgacaagttgcgaatggagacatgcttccaacaggcgtgtaagggtaaaatccaagcactctgcgagaatcccgagtgggcaccattgaaggataacaggattccttcatacggggtcttgtctgttgatctgagtctgacagttgagcttaaaatcaaaattgcttcgggattcgggccattgatcacacacggttcagggatggacctatacaaatccaaccacaacaatgtgtattggctgactatcccgccaatgaagaacctagccttaggtgtaatcaacacattggagtggataccgagattcaaggttagtccctacctcttcactgtcccaattaaggaagcaggcgaagactgccatgccccaacatacctacctgcggaggtggatggtgatgtcaaactcagttccaatctggtgattctacctggtcaagatctccaatatgttttggcaacctacgatacttccagggttgaacatgctgtggtttattacgtttacagcccaagccgctcattttcttacttttatccttttaggttgcctataaagggggtccccatcgaattacaagtggaatgcttcacatgggaccaaaaactctggtgccgtcacttctgtgtgcttgcggactcagaatctggtggacatatcactcactctgggatggtgggcatgggagtcagctgcacagtcacccgggaagatggaaccaatcgcagatagggctgctagtgaaccaatcacatgatgtcacccagacatcaggcatacccactagtctaccctccatcattgttataaaaaacttaggaaccaggtccacacagccgccagcccatcaacgcgtacggccaccatgggtagacttacaagtggggtgggaactgccgcacttttggttgttgctgtgggcttgcgagtggtttgcgctaaatacgcactcgccgatccgtccctcaaaatggcagaccccaatcggtttcggggcaagaatttgccagtccttgaccagctgacagaccctccaggggttaagagagtgtatcacatccagccctcccttgaggaccccttccaacccccatctataccgatcaccgtgtattacgccgtgctcgaacgcgcttgcaggtctgtgttgctgcacgcaccatctgaggctccccagattgttagaggggcaagcgacgaagcgagaaagcacacttacaacctcaccatagcttggtaccgcatgggcgacaactgcgccatcccaatcactgttatggaatatactgagtgcccttacaataaatctctgggtgtgtgtcctattaggacacagcctcgctggagctactatgactccttctctgccgtgagtgaagataatttgggtttcctgatgcacgcacccgcctttgagacagcaggtacgtaccttaggcttgtaaaaatcaacgattggaccgagataacccagtttattctggagcacagggctagagcatcctgtaaatacgcgttgccactccggataccaccagccgcttgcttgacctccaaggcttatcaacagggcgtaacggtggattccatcggcatgctccctaggttcatccctgaaaatcaaagaacggtggcactgtattcactcaagattgccggctggcacggccctaagccaccatacacctctactctgctgcccccggagctgagtgataccactaacgcaacccagcctgaactggtgccagaggatcctgaagattctgcattgctggaagacccagccggcactgtgtctagtcaaattccccctaattggcacataccgagcattcaggacgttgctccacaccacgctccggctgctccaagcaatcctggcctgataataggtgcattggccggttctaccctcgccgtcctggtgattgggggtatcgccttctgggttaggaggagagctcaaatggcccccaagcgcttgaggttgccgcacataagagacgacgacgcccccccttctcaccagcctctgttttatagagcaaagagagcgacgaacttctcactgcttaagcaagcaggagacgtggaggagaatccgggcccaatgaggggaggaggccttgtctgtgcacttgttgtaggagctttggtcgccgccgtagctagtgcagctccagcagcaccaagggcttcaggaggggttgcagctactgttgctgctaacggaggacctgctagccaaccacctccggtgccttctccggctactaccaaagcccgcaagcgaaaaacaaagaagcccccaaagaggccagaggccacacctccacccgacgctaacgctactgtggcggctggacacgctactttgagagcccacctgcgggaaatcaaggttgagaacgcagacgcacaattctacgtttgtcccccccctacaggtgcaacagtcgtgcagtttgagcagccaagacgctgtcctactaggcctgagggacaaaattacaccgagggtatcgccgtagtttttaaggagaatatcgcaccctataagtttaaagcgacaatgtactataaggatgtgaccgtcagccaagtctggtttggtcaccgatacagtcagtttatgggaatctttgaggaccgggccccggtccctttcgaagaagtgatcgacaagattaacgccaagggagtgtgcaggtcaaccgcaaagtacgtccgaaacaatatggaaacaaccgccttccacagggacgaccacgaaacagatatggagcttaagccggctaaagtggccactcgcacgtcaagaggttggcataccacggacctgaaatataacccttctagagttgaagctttccaccggtatgggaccacggtgaactgtattgtggaagaagtggacgccagatccgtgtacccctacgacgaattcgttcttgctacaggcgatttcgtgtatatgtctcctttctacggctacagggagggctcccacaccgagcacacctcctacgccgcagatagatttaaacaggtggacggcttctacgctcgcgatctgactactaaggcacgggcaacaagcccaacaactcgcaatttgctgaccacaccaaagtttactgtggcctgggactgggtacccaagaggcctgctgtttgcacaatgaccaaatggcaggaggttgacgagatgctccgggccgaatatggaggatcctttagattctcttctgacgctatcagtaccaccttcaccacaaatctgactcagtactctctgtctcgcgtagatctgggagactgtatcggtagggacgcacgcgaggctatagatcggatgttcgcccggaaatacaacgccacccacattaaagtggggcagccccagtattacttggctactgggggcttccttatcgcttatcagcctctgctctcaaataccctggcggagctttatgtacgcgagtatatgagggagcaggacaggaagccacgcaacgctaccccagcacccctgagagaagcgccttctgccaacgcgagtgtggaacgaattaagaccacgtcttcaatcgaattcgctcggctccaatttacctacaaccacattcaacgccacgttaacgatatgctgggaaggattgcagttgcttggtgtgagctccagaaccacgaactgacactgtggaacgaggccagaaagcttaacccaaacgctattgcttccgcgacagttggaagaagagtgtctgcacgaatgctcggcgacgttatggctgttagtacctgtgtgcctgtggcccctgacaatgtaattgttcagaacagtatgagagtctcttctagacccggcacttgctactccaggccactggtctcttttcgctacgaggatcaggggcctttgatcgagggccagttgggagagaataacgaactgcgcctgaccagagacgctctggaaccctgtacagtcggccacagacgatattttatattcggcggcggttacgtatattttgaagagtatgcgtactcccaccaactgtccagagcagatgtgaccactgtgagcacttttatcgatctcaatatcactatgctggaggatcacgagtttgttccgttggaagtgtacactcggcacgagatcaaggacagtggcctgctcgattataccgaagtccagaggcgcaatcaactgcacgatctgagatttgccgatattgacacagtgattagggctgacgctaacgccgctatgtttgctggcctgtgtgcctttttcgagggaatgggtgatctcggaagagccgtaggcaaggtggttatgggagtcgtaggtggcgtcgttagtgccgtgtcaggggtgtctagctttatgtctaaccccttcggagctttggctgtgggtctcctggtacttgccggactggtggccgcattttttgcctttaggtacgtcctgcagctgcagaggaatccaatgaaggccctgtatccacttacaacaaaggaacttaaaacctccgatcctggaggagttggaggagaaggcgaagagggagcggaaggtggtgggtttgacgaggccaagttggctgaggcccgagagatgataaggtatatggctctcgtatctgcaatggagagaactgagcacaaagctcgcaagaagggaaccagtgccctgctgagcagcaaagtgacaaatatggtgcttcgaaaacgcaataaggctcgctactctcctctgcacaacgaggacgaagcaggggatgaggacgaactcagagcaaagagagagggaagaggctccttgctgacctgcggtgacgtggaagagaatcccggccctatggcattgggtagagttggtttggctgtgggactttggggtctcctctgggtcggtgtggttgtcgtactggctaacgcttctccaggccgcactattactgttggaccgagagggaacgcttccaacgctgctccctctgcctcccctaggaacgcttctgctcctagaactacacctactccaccgcaaccccgcaaagcaaccaaaagcaaggcctcaaccgctaaaccagctcctccaccgaagacaggcccacctaaaaccagcagcgagcccgtgcggtgtaatcgacacgatcccctggcccgatacggtagtcgggtgcaaatccgctgtaggtttcctaatagtactagaacagaaagcaggctgcagatctggagatacgccactgccactgacgcagaaatcgggaccgccccttcccttgaggaggtgatggtgaacgtaagcgctccaccaggaggtcagctcgtctacgactcagcacccaataggaccgatccacacgtgatttgggcagaaggagctggaccaggcgcctctccaaggttgtattccgttgtaggcccactgggtcggcagagactgattatcgaagaactgactctggaaacccagggaatgtactattgggtttggggaaggactgataggcctagtgcttacggtacttgggtgagagtcagggtatttcggcctccttccctgactatacacccacacgcagtgctcgagggtcagcctttcaaggccacttgcacagccgcaacttactaccctgggaaccgagcagagtttgtgtggtttgaagacgggcggagagtttttgaccccgcacagatccacacgcagacccaggaaaaccctgacggattctccaccgttagcactgtgacctctgccgcagttggaggacaaggaccgccaaggaccttcacctgtcagctgacctggcaccgcgactctgtttcagcgtctagacggaacgcgagcggtactgcctctgtgctccccagacccacaatcacaatggagttcaccggcgatcacgccgtgtgtacggctggttgtgtacccgaaggcgtgacctttgcttggtttttgggagacgatagctcacctgccgagaaagtcgcagtggcttcacaaacttcctgcggaaggcccgggactgccactatccgatctacgctccccgtgtcttacgagcagacagaatatatttgccgactggcaggatatccagacggaatacccgtcctggaacaccacggttctcaccagcctccaccgagagatccaaccgagcgacaggtaatcagagccgtggaaggagcgggtattggcgtggcagttctcgttgctgtcgtacttgccggcacggctgttgtgtatctcactcacgccagcagcgtgcgatacaggcgcctcagatgagcgcgcagcgcttagacgtctcgcgatcgatgctagtgtgaaatagacatcagaattaagaaaaacgtagggtccaagtggttccccgttatggactcgctatctgtcaaccagatcttataccctgaagttcacctagatagcccgatagttaccaataagatagtagccatcctggagtatgctcgagtccctcacgcttacagcctggaggaccctacactgtgtcagaacatcaagcaccgcctaaaaaacggattttccaaccaaatgattataaacaatgtggaagttgggaatgtcatcaagtccaagcttaggagttatccggcccactctcatattccatatccaaattgtaatcaggatttatttaacatagaagacaaagagtcaacgaggaagatccgtgaactcctcaaaaaggggaattcgctgtactccaaagtcagtgataaggttttccaatgcttaagggacactaactcacggcttggcctaggctccgaattgagggaggacatcaaggagaaagttattaacttgggagtttacatgcacagctcccagtggtttgagccctttctgttttggtttacagtcaagactgagatgaggtcagtgattaaatcacaaacccatacttgccataggaggagacacacacctgtattcttcactggtagttcagttgagttgctaatctctcgtgaccttgttgctataatcagtaaagagtctcaacatgtatattacctgacatttgaactggttttgatgtattgtgatgtcatagaggggaggttaatgacagagaccgctatgactattgatgctaggtatacagagcttctaggaagagtcagatacatgtggaaactgatagatggtttcttccctgcactcgggaatccaacttatcaaattgtagccatgctggagcctctttcacttgcttacctgcagctgagggatataacagtagaactcagaggtgctttccttaaccactgctttactgaaatacatgatgttcttgaccaaaacgggttttctgatgaaggtacttatcatgagttaactgaagctctagattacattttcataactgatgacatacatctgacaggggagattttctcatttttcagaagtttcggccaccccagacttgaagcagtaacggctgctgaaaatgttaggaaatacatgaatcagcctaaagtcattgtgtatgagactctgatgaaaggtcatgccatattttgtggaatcataatcaacggctatcgtgacaggcacggaggcagttggccaccgctgaccctccccctgcatgctgcagacacaatccggaatgctcaagcttcaggtgaagggttaacacatgagcagtgcgttgataactggaaatcttttgctggagtgaaatttggctgctttatgcctcttagcctggatagtgatctgacaatgtacctaaaggacaaggcacttgctgctctccaaagggaatgggattcagtttacccgaaagagttcctgcgttacgaccctcccaagggaaccgggtcacggaggcttgtagatgttttccttaatgattcgagctttgacccatatgatgtgataatgtatgttgtaagtggagcttacctccatgaccctgagttcaacctgtcttacagcctgaaagaaaaggagatcaaggaaacaggtagactttttgctaaaatgacttacaaaatgagggcatgccaagtgattgctgaaaatctaatctcaaacgggattggcaaatattttaaggacaatgggatggccaaggatgagcacgatttgactaaggcactccacactctagctgtctcaggagtccccaaagatctcaaagaaagtcacaggggggggccagtcttaaaaacctactcccgaagcccagtccacacaagtaccaggaacgtgagagcagcaaaagggtttatagggttccctcaagtaattcggcaggaccaagacactgatcatccggagaatatggaagcttacgagacagtcagtgcatttatcacgactgatctcaagaagtactgccttaattggagatatgagaccatcagcttgtttgcacagaggctaaatgagatttacggattgccctcatttttccagtggctgcataagaggcttgagacctctgtcctgtatgtaagtgaccctcattgcccccccgaccttgacgcccatatcccgttatataaagtccccaatgatcaaatcttcattaagtaccctatgggaggtatagaagggtattgtcagaagctgtggaccatcagcaccattccctatctatacctggctgcttatgagagcggagtaaggattgcttcgttagtgcaaggggacaatcagaccatagccgtaacaaaaagggtacccagcacatggccctacaaccttaagaaacgggaagctgctagagtaactagagattactttgtaattcttaggcaaaggctacatgatattggccatcacctcaaggcaaatgagacaattgtttcatcacatttttttgtctattcaaaaggaatatattatgatgggctacttgtgtcccaatcactcaagagcatcgcaagatgtgtattctggtcagagactatagttgatgaaacaagggcagcatgcagtaatattgctacaacaatggctaaaagcatcgagagaggttatgaccgttaccttgcatattccctgaacgtcctaaaagtgatacagcaaattctgatctctcttggcttcacaatcaattcaaccatgacccgggatgtagtcatacccctcctcacaaacaacgacctcttaataaggatggcactgttgcccgctcctattggggggatgaattatctgaatatgagcaggctgtttgtcagaaacatcggtgatccagtaacatcatcaattgctgatctcaagagaatgattctcgcctcactaatgcctgaagagaccctccatcaagtaatgacacaacaaccgggggactcttcattcctagactgggctagcgacccttactcagcaaatcttgtatgtgtccagagcatcactagactcctcaagaacataactgcaaggtttgtcctgatccatagtccaaacccaatgttaaaaggattattccatgatgacagtaaagaagaggacgagggactggcggcattcctcatggacaggcatattatagtacctagggcagctcatgaaatcctggatcatagtgtcacaggggcaagagagtctattgcaggcatgctggataccacaaaaggcttgattcgagccagcatgaggaagggggggttaacctctcgagtgataaccagattgtccaattatgactatgaacaattcagagcagggatggtgctattgacaggaagaaagagaaatgtcctcattgacaaagagtcatgttcagtgcagctggcgagagctctaagaagccatatgtgggcgaggctagctcgaggacggcctatttacggccttgaggtccctgatgtactagaatctatgcgaggccaccttattcggcgtcatgagacatgtgtcatctgcgagtgtggatcagtcaactacggatggttttttgtcccctcgggttgccaactggatgatattgacaaggaaacatcatccttgagagtcccatatattggttctaccactgatgagagaacagacatgaagcttgccttcgtaagagccccaagtcgatccttgcgatctgctgttagaatagcaacagtgtactcatgggcttacggtgatgatgatagctcttggaacgaagcctggttgttggctaggcaaagggccaatgtgagcctggaggagctaagggtgatcactcccatctcaacttcgactaatttagcgcataggttgagggatcgtagcactcaagtgaaatactcaggtacatcccttgtccgagtggcgaggtataccacaatctccaacgacaatctctcatttgtcatatcagataagaaggttgatactaactttatataccaacaaggaatgcttctagggttgggtgttttagaaacattgtttcgactcgagaaagataccggatcatctaacacggtattacatcttcacgtcgaaacagattgttgcgtgatcccgatgatagatcatcccaggatacccagctcccgcaagctagagctgagggcagagctatgtaccaacccattgatatatgataatgcacctttaattgacagagatgcaacaaggctatacacccagagccataggaggcaccttgtggaatttgttacatggtccacaccccaactatatcacattttagctaagtccacagcactatctatgattgacctggtaacaaaatttgagaaggaccatatgaatgaaatttcagctctcataggggatgacgatatcaatagtttcataactgagtttctgctcatagagccaagattattcactatctacttgggccagtgtgcggccatcaattgggcatttgatgtacattatcatagaccatcagggaaatatcagatgggtgagctgttgtcatcgttcctttctagaatgagcaaaggagtgtttaaggtgcttgtcaatgctctaagccacccaaagatctacaagaaattctggcattgtggtattatagagcctatccatggtccttcacttgatgctcaaaacttgcacacaactgtgtgcaacatggtttacacatgctatatgacctacctcgacctgttgttgaatgaagagttagaagagttcacatttctcttgtgtgaaagcgacgaggatgtagtaccggacagattcgacaacatccaggcaaaacacttatgtgttctggcagatttgtactgtcaaccagggacctgcccaccaattcgaggtctaagaccggtagagaaatgtgcagttctaaccgaccatatcaaggcagaggctatgttatctccagcaggatcttcgtggaacataaatccaattattgtagaccattactcatgctctctgacttatctccggcgaggatcgatcaaacagataagattgagagttgatccaggattcattttcgacgccctcgctgaggtaaatgtcagtcagccaaagatcggcagcaacaacatctcaaatatgagcatcaaggctttcagacccccacacgatgatgttgcaaaattgctcaaagatatcaacacaagcaagcacaatcttcccatttcagggggcaatctcgccaattatgaaatccatgctttccgcagaatcgggttgaactcatctgcttgctacaaagctgttgagatatcaacattaattaggagatgccttgagccaggggaggacggcttgttcttgggtgagggatcgggttctatgttgatcacttataaagagatacttaaactaaacaagtgcttctataatagtggggtttccgccaattctagatctggtcaaagggaattagcaccctatccctccgaagttggccttgtcgaacacagaatgggagtaggtaatattgtcaaagtgctctttaacgggaggcccgaagtcacgtgggtaggcagtgtagattgcttcaatttcatagttagtaatatccctacctctagtgtggggtttatccattcagatatagagaccttgcctgacaaagatactatagagaagctagaggaattggcagccatcttatcgatggctctgctcctgggcaaaataggatcaatactggtgattaagcttatgcctttcagcggggattttgttcagggatttataagttatgtagggtctcattatagagaagtgaaccttgtataccctagatacagcaacttcatctctactgaatcttatttggttatgacagatctcaaggctaaccggctaatgaatcctgaaaagattaagcagcagataattgaatcatctgtgaggacttcacctggacttataggtcacatcctatccattaagcaactaagctgcatacaagcaattgtgggagacgcagttagtagaggtgatatcaatcctactctgaaaaaacttacacctatagagcaggtgctgatcaattgcgggttggcaattaacggacctaagctgtgcaaagaattgatccaccatgatgttgcctcagggcaagatggattgcttaattctatactcatcctctacagggagttggcaagattcaaagacaaccaaagaagtcaacaagggatgttccacgcttaccccgtattggtaagtagcaggcaacgagaacttatatctaggatcacccgcaaattctgggggcacattcttctttactccgggaacaaaaagttgataaataagtttatccagaatctcaagtccggctatctgatactagacttacaccagaatatcttcgttaagaatctatccaagtcagagaaacagattattatgacggggggtttgaaacgtgagtgggtttttaaggtaacagtcaaggagaccaaagaatggtataagttagtcggatacagtgccctgattaaggactaattggttgaactccggaaccctaatcctgccctaggtggttaggcattatttgcaatatattaaagaaaactttgaaaatacgaagtttctattcccagctttgtctggt

SEQ ID NO: 83 - DNA, 23 bp, unidentified
  source 1..23: mol_type = unassigned DNA
cttctagtgcacttaggattcaa

SEQ ID NO: 84 - DNA, 11 bp, unidentified
  source 1..11: mol_type = unassigned DNA
cttctagtgca

SEQ ID NO: 85-86 - skipped (2 entries)

SEQ ID NO: 87 - DNA, 31 bp, unidentified
  source 1..31: mol_type = unassigned DNA
gttataaaaaacttaggaaccaggtccacac

SEQ ID NO: 88 - DNA, 11 bp, unidentified
  source 1..11: mol_type = unassigned DNA
gttataaaaaa

SEQ ID NO: 89 - DNA, 17 bp, unidentified
  source 1..17: mol_type = unassigned DNA
aggaaccaggtccacac

SEQ ID NO: 90 - DNA, 31 bp, unidentified
  source 1..31: mol_type = unassigned DNA
attataaaaaacttaggagcaaagtgattgc

SEQ ID NO: 91 - DNA, 11 bp, unidentified
  source 1..11: mol_type = unassigned DNA
attataaaaaa

SEQ ID NO: 92 - DNA, 17 bp, unidentified
  source 1..17: mol_type = unassigned DNA
aggagcaaagtgattgc

SEQ ID NO: 93 - DNA, 31 bp, synthetic construct
  source 1..31: mol_type = other DNA
attataaaaaacttaggaaccaggtccacac

SEQ ID NO: 94 - DNA, 17 bp, synthetic construct
  source 1..17: mol_type = other DNA
aggagcaaagtccacac

SEQ ID NO: 95 - DNA, 31 bp, synthetic construct
  source 1..31: mol_type = other DNA
gttataaaaaacttaggagcaaagtccacac

SEQ ID NO: 96 - DNA, 17 bp, synthetic construct
  source 1..17: mol_type = other DNA
aggatccaagagcatac

SEQ ID NO: 97 - DNA, 31 bp, synthetic construct
  source 1..31: mol_type = other DNA
gttataaaaaacttaggatccaagagcatac

SEQ ID NO: 98-99 - skipped (2 entries)

SEQ ID NO: 100 - protein, 876 aa, synthetic construct
MRGGGLVCALVVGALVAAVASAAPAAPRASGGVAATVAANGGPASQPPPVPSPATTKARKRKTKKPPKRPEATPPPDANATVAAGHATLRAHLREIKVENADAQFYVCPPPTGATVVQFEQPRRCPTRPEGQNYTEGIAVVFKENIAPYKFKATMYYKDVTVSQVWFGHRYSQFMGIFEDRAPVPFEEVIDKINAKGVCRSTAKYVRNNMETTAFHRDDHETDMELKPAKVATRTSRGWHTTDLKYNPSRVEAFHRYGTTVNCIVEEVDARSVYPYDEFVLATGDFVYMSPFYGYREGSHTEHTSYAADRFKQVDGFYARDLTTKARATSPTTRNLLTTPKFTVAWDWVPKRPAVCTMTKWQEVDEMLRAEYGGSFRFSSDAISTTFTTNLTQYSLSRVDLGDCIGRDAREAIDRMFARKYNATHIKVGQPQYYLATGGFLIAYQPLLSNTLAELYVREYMREQDRKPRNATPAPLREAPSANASVERIKTTSSIEFARLQFTYNHIQRHVNDMLGRIAVAWCELQNHELTLWNEARKLNPNAIASATVGRRVSARMLGDVMAVSTCVPVAPDNVIVQNSMRVSSRPGTCYSRPLVSFRYEDQGPLIEGQLGENNELRLTRDALEPCTVGHRRYFIFGGGYVYFEEYAYSHQLSRADVTTVSTFADLNITMLEDAEAVPLEVYTRHEIKDSGLLDYTEVQRRNQLHDLRFADIDTVIRADANAAMFAGLCAFFEGMGDLGRAVGKVVMGVVGGVVSAVSGVSSFMSNPFGALAVGLLVLAGLVAAFFAFRYVLQLQRNPMKALYPLTTKELKTSDPGGVGGEGEEGAEGGGFDEAKLAEAREMIRYMALVSAMERTEHKARKKGTSALLSSKVTNM

SEQ ID NO: 101 - DNA, 18642 bp, synthetic construct
  source 1..18642: mol_type = other DNA
accaaacaaagttgggtaaggatagttcaatcaatgatcatcttctagtgcacttaggattcaagatcctattatcagggacaagagcaggattagggatatccgagatggccacacttttaaggagcttagcattgttcaaaagaaacaaggacaaaccacccattacatcaggatccggtggagccatcagaggaatcaaacacattattatagtaccaatccctggagattcctcaattaccactcgatccagacttctggaccggttggtgaggttaattggaaacccggatgtgagcgggcccaaactaacaggggcactaataggtatattatccttatttgtggagtctccaggtcaattgattcagaggatcaccgatgaccctgacgttagcataaggctgttagaggttgtccagagtgaccagtcacaatctggccttaccttcgcatcaagaggtaccaacatggaggatgaggcggaccaatacttttcacatgatgatccaattagtagtgatcaatccaggttcggatggttcgggaacaaggaaatctcagatattgaagtgcaagaccctgagggattcaacatgattctgggtaccatcctagcccaaatttgggtcttgctcgcaaaggcggttacggccccagacacggcagctgattcggagctaagaaggtggataaagtacacccaacaaagaagggtagttggtgaatttagattggagagaaaatggttggatgtggtgaggaacaggattgccgaggacctctccttacgccgattcatggtcgctctaatcctggatatcaagagaacacccggaaacaaacccaggattgctgaaatgatatgtgacattgatacatatatcgtagaggcaggattagccagttttatcctgactattaagtttgggatagaaactatgtatcctgctcttggactgcatgaatttgctggtgagttatccacacttgagtccttgatgaacctttaccagcaaatgggggaaactgcaccctacatggtaatcctggagaactcaattcagaacaagttcagtgcaggatcataccctctgctctggagctatgccatgggagtaggagtggaacttgaaaactccatgggaggtttgaactttggccgatcttactttgatccagcatattttagattagggcaagagatggtaaggaggtcagctggaaaggtcagttccacattggcatctgaactcggtatcactgccgaggatgcaaggcttgtttcagagattgcaatgcatactactgaggacaagatcagtagagcggttggacccagacaagcccaagtatcatttctacacggtgatcaaagtgagaatgagctaccgagattggggggcaaggaagataggagggtcaaacagagtcgaggagaagccagggagagctacagagaaaccgggcccagcagagcaagtgatgcgagagctgcccatcttccaaccggcacacccctagacattgacactgcaacggagtccagccaagatccgcaggacagtcgaaggtcagctgacgccctgcttaggctgcaagccatggcaggaatctcggaagaacaaggctcagacacggacacccctatagtgtacaatgacagaaatcttctagactaggtgcgagaggccgagggccagaacaacatccgcctaccatccatcattgttataaaaaacttaggaaccaggtccacacagccgccagcccatcaaccatccactcccacgattggagccaatggcagaagagcaggcacgccatgtcaaaaacggactggaatgcatccgggctctcaaggccgagcccatcggctcactggccatcgaggaagctatggcagcatggtcagaaatatcagacaacccaggacaggagcgagccacctgcagggaagagaaggcaggcagttcgggtctcagcaaaccatgcctctcagcaattggatcaactgaaggcggtgcacctcgcatccgcggtcagggacctggagagagcgatgacgacgctgaaactttgggaatccccccaagaaatctccaggcatcaagcactgggttacagtgttattacgtttatgatcacagcggtgaagcggttaagggaatccaagatgctgactctatcatggttcaatcaggccttgatggtgatagcaccctctcaggaggagacaatgaatctgaaaacagcgatgtggatattggcgaacctgataccgagggatatgctatcactgaccggggatctgctcccatctctatggggttcagggcttctgatgttgaaactgcagaaggaggggagatccacgagctcctgagactccaatccagaggcaacaactttccgaagcttgggaaaactctcaatgttcctccgcccccggaccccggtagggccagcacttccgggacacccattaaaaagggcacagacgcgagattagcctcatttggaacggagatcgcgtctttattgacaggtggtgcaacccaatgtgctcgaaagtcaccctcggaaccatcagggccaggtgcacctgcggggaatgtccccgagtgtgtgagcaatgccgcactgatacaggagtggacacccgaatctggtaccacaatctccccgagatcccagaataatgaagaagggggagactattatgatgatgagctgttctctgatgtccaagatattaaaacagccttggccaaaatacacgaggataatcagaagataatctccaagctagaatcactgctgttattgaagggagaagttgagtcaattaagaagcagatcaacaggcaaaatatcagcatatccaccctggaaggacacctctcaagcatcatgatcgccattcctggacttgggaaggatcccaacgaccccactgcagatgtcgaaatcaatcccgacttgaaacccatcataggcagagattcaggccgagcactggccgaagttctcaagaaacccgttgccagccgacaactccaaggaatgacaaatggacggaccagttccagaggacagctgctgaaggaatttcagctaaagccgatcgggaaaaagatgagctcagccgtcgggtttgttcctgacaccggccctgcatcacgcagtgtaatccgctccattataaaatccagccggctagaggaggatcggaagcgttacctgatgactctccttgatgatatcaaaggagccaatgatcttgccaagttccaccagatgctgatgaagataataatgaagtagctacagctcaacttacctgccaaccccatgccagtcgacccaactagtacaacctaaatccattataaaaaacttaggagcaaagtgattgcctcccaaggtccacaatgacagagacctacgacttcgacaagtcggcatgggacatcaaagggtcgatcgctccgatacaacccaccacctacagtgatggcaggctggtgccccaggtcagagtcatagatcctggtctaggcgacaggaaggatgaatgctttatgtacatgtttctgctgggggttgttgaggacagcgattccctagggcctccaatcgggcgagcatttgggttcctgcccttaggtgttggcagatccacagcaaagcccgaaaaactcctcaaagaggccactgagcttgacatagttgttagacgtacagcagggctcaatgaaaaactggtgttctacaacaacaccccactaactctcctcacaccttggagaaaggtcctaacaacagggagtgtcttcaacgcaaaccaagtgtgcaatgcggttaatctgataccgctcgataccccgcagaggttccgtgttgtttatatgagcatcacccgtctttcggataacgggtattacaccgttcctagaagaatgctggaattcagatcggtcaatgcagtggccttcaacctgctggtgacccttaggattgacaaggcgataggccctgggaagatcatcgacaatacagagcaacttcctgaggcaacatttatggtccacatcgggaacttcaggagaaagaagagtgaagtctactctgccgattattgcaaaatgaaaatcgaaaagatgggcctggtttttgcacttggtgggatagggggcaccagtcttcacattagaagcacaggcaaaatgagcaagactctccatgcacaactcgggttcaagaagaccttatgttacccgctgatggatatcaatgaagaccttaatcgattactctggaggagcagatgcaagatagtaagaatccaggcagttttgcagccatcagttcctcaagaattccgcatttacgacgacgtgatcataaatgatgaccaaggactattcaaagttctgtagaccgtagtgcccagcaatgcccgaaaacgacccccctcacaatgacagccagaaggcccggacaaaaaagccccctccgaaagactccacggaccaagcgagaggccagccagcagccgacggcaagcgcgaacaccaggcggccccagcacagaacagccctgacacaaggccaccaccagccaccccaatctgcatcctcctcgtgggacccccgaggaccaacccccaaggctgcccccgatccaaaccaccaaccgcatccccaccacccccgggaaagaaacccccagcaattggaaggcccctccccctcttcctcaacacaagaactccacaaccgaaccgcacaagcgaccgaggtgacccaaccgcaggcatccgactccctagacagatcctctctccccggcaaactaaacaaaacttagggccaaggaacatacacacccaacagaacccagaccccggcccacggcgccgcgcccccaacccccgacaaccagagggagcccccaaccaatcccgccggctcccccggtgcccacaggcagggacaccaacccccgaacagacccagcacccaaccatcgacaatccaagacgggggggcccccccaaaaaaaggcccccaggggccgacagccagcaccgcgaggaagcccacccaccccacacacgaccacggcaaccaaaccagaacccagaccaccctgggccaccagctcccagactcggccatcaccccgcagaaaggaaaggccacaacccgcgcaccccagccccgatccggcggggagccacccaacccgaaccagcacccaagagcgatccccgaaggacccccgaaccgcaaaggacatcagtatcccacagcctctccaagtcccccggtctcctcctcttctcgaagggaccaaaagatcaatccaccacacccgacgacactcaactccccacccctaaaggagacaccgggaatcccagaatcaagactcatccaatgtccatcatgggtctcaaggtgaacgtctctgccatattcatggcagtactgttaactctccaaacacccaccggtcaaatccattggggcaatctctctaagataggggtggtaggaataggaagtgcaagctacaaagttatgactcgttccagccatcaatcattagtcataaaattaatgcccaatataactctcctcaataactgcacgagggtagagattgcagaatacaggagactactgagaacagttttggaaccaattagagatgcacttaatgcaatgacccagaatataagaccggttcagagtgtagcttcaagtaggagacacaagagatttgcgggagtagtcctggcaggtgcggccctaggcgttgccacagctgctcagataacagccggcattgcacttcaccagtccatgctgaactctcaagccatcgacaatctgagagcgagcctggaaactactaatcaggcaattgagacaatcagacaagcagggcaggagatgatattggctgttcagggtgtccaagactacatcaataatgagctgataccgtctatgaaccaactatcttgtgatttaatcggccagaagctcgggctcaaattgctcagatactatacagaaatcctgtcattatttggccccagtttacgggaccccatatctgcggagatatctatccaggctttgagctatgcgcttggaggagacatcaataaggtgttagaaaagctcggatacagtggaggtgatttactgggcatcttagagagcggaggaataaaggcccggataactcacgtcgacacagagtcctacttcattgtcctcagtatagcctatccgacgctgtccgagattaagggggtgattgtccaccggctagagggggtctcgtacaacataggctctcaagagtggtataccactgtgcccaagtatgttgcaacccaagggtaccttatctcgaattttgatgagtcatcgtgtactttcatgccagaggggactgtgtgcagccaaaatgccttgtacccgatgagtcctctgctccaagaatgcctccgggggtacaccaagtcctgtgctcgtacactcgtatccgggtcttttgggaaccggttcattttatcacaagggaacctaatagccaattgtgcatcaatcctttgcaagtgttacacaacaggaacgatcattaatcaagaccctgacaagatcctaacatacattgctgccgatcactgcccggtagtcgaggtgaacggcgtgaccatccaagtcgggagcaggaggtatccagacgctgtgtacttgcacagaattgacctcggtcctcccatatcattggagaggttggacgtagggacaaatctggggaatgcaattgctaagttggaggatgccaaggaattgttggagtcatcggaccagatattgaggagtatgaaaggtttatcgagcactagcatagtctacatcctgattgcagtgtgtcttggagggttgatagggatccccgctttaatatgttgctgcagggggcgttgtaacaaaaagggagaacaagttggtatgtcaagaccaggcctaaagcctgatcttacgggaacatcaaaatcctatgtaaggtcgctctgatcctctacaactcttgaaacacaaatgtcccacaagtctcctcttcgtcatcaagcaaccaccgcacccagcatcaagcccacctgaaattatctccggcttccctctggccgaacaatatcggtagttaatcaaaacttagggtgcaagatcatccacaatgtcaccacaacgagaccggataaatgccttctacaaagataacccccatcccaagggaagtaggatagtcattaacagagaacatcttatgattgatagaccttatgttttgctggctgttctgtttgtcatgtttctgagcttgatcgggttgctagccattgcaggcattagacttcatcgggcagccatctacaccgcagagatccataaaagcctcagcaccaatctagatgtaactaactcaatcgagcatcaggtcaaggacgtgctgacaccactcttcaaaatcatcggtgatgaagtgggcctgaggacacctcagagattcactgacctagtgaaattaatctctgacaagattaaattccttaatccggatagggagtacgacttcagagatctcacttggtgtatcaacccgccagagagaatcaaattggattatgatcaatactgtgcagatgtggctgctgaagagctcatgaatgcattggtgaactcaactctactggagaccagaacaaccaatcagttcctagctgtctcaaagggaaactgctcagggcccactacaatcagaggtcaattctcaaacatgtcgctgtccctgttagacttgtatttaggtcgaggttacaatgtgtcatctatagtcactatgacatcccagggaatgtatgggggaacttacctagtggaaaagcctaatctgagcagcaaaaggtcagagttgtcacaactgagcatgtaccgagtgtttgaagtaggtgttatcagaaatccgggtttgggggctccggtgttccatatgacaaactatcttgagcaaccagtcagtaatgatctcagcaactgtatggtggctttgggggagctcaaactcgcagccctttgtcacggggaagattctatcacaattccctatcagggatcagggaaaggtgtcagcttccagctcgtcaagctaggtgtctggaaatccccaaccgacatgcaatcctgggtccccttatcaacggatgatccagtgatagacaggctttacctctcatctcacagaggtgttatcgctgacaatcaagcaaaatgggctgtcccgacaacacgaacagatgacaagttgcgaatggagacatgcttccaacaggcgtgtaagggtaaaatccaagcactctgcgagaatcccgagtgggcaccattgaaggataacaggattccttcatacggggtcttgtctgttgatctgagtctgacagttgagcttaaaatcaaaattgcttcgggattcgggccattgatcacacacggttcagggatggacctatacaaatccaaccacaacaatgtgtattggctgactatcccgccaatgaagaacctagccttaggtgtaatcaacacattggagtggataccgagattcaaggttagtccctacctcttcactgtcccaattaaggaagcaggcgaagactgccatgccccaacatacctacctgcggaggtggatggtgatgtcaaactcagttccaatctggtgattctacctggtcaagatctccaatatgttttggcaacctacgatacttccagggttgaacatgctgtggtttattacgtttacagcccaagccgctcattttcttacttttatccttttaggttgcctataaagggggtccccatcgaattacaagtggaatgcttcacatgggaccaaaaactctggtgccgtcacttctgtgtgcttgcggactcagaatctggtggacatatcactcactctgggatggtgggcatgggagtcagctgcacagtcacccgggaagatggaaccaatcgcagatagggctgctagtgaaccaatcacatgatgtcacccagacatcaggcatacccactagtctaccctccatcattgttataaaaaacttaggaaccaggtccacacagccgccagcccatcaacgcgtacggccaccatgaggggaggaggccttgtctgtgcacttgttgtaggagctttggtcgccgccgtagctagtgcagctccagcagcaccaagggcttcaggaggggttgcagctactgttgctgctaacggaggacctgctagccaaccacctccggtgccttctccggctactaccaaagcccgcaagcgaaaaacaaagaagcccccaaagaggccagaggccacacctccacccgacgctaacgctactgtggcggctggacacgctactttgagagcccacctgcgggaaatcaaggttgagaacgcagacgcacaattctacgtttgtcccccccctacaggtgcaacagtcgtgcagtttgagcagccaagacgctgtcctactaggcctgagggacaaaattacaccgagggtatcgccgtagtttttaaggagaatatcgcaccctataagtttaaagcgacaatgtactataaggatgtgaccgtcagccaagtctggtttggtcaccgatacagtcagtttatgggaatctttgaggaccgggccccggtccctttcgaagaagtgatcgacaagattaacgccaagggagtgtgcaggtcaaccgcaaagtacgtccgaaacaatatggaaacaaccgccttccacagggacgaccacgaaacagatatggagcttaagccggctaaagtggccactcgcacgtcaagaggttggcataccacggacctgaaatataacccttctagagttgaagctttccaccggtatgggaccacggtgaactgtattgtggaagaagtggacgccagatccgtgtacccctacgacgaattcgttcttgctacaggcgatttcgtgtatatgtctcctttctacggctacagggagggctcccacaccgagcacacctcctacgccgcagatagatttaaacaggtggacggcttctacgctcgcgatctgactactaaggcacgggcaacaagcccaacaactcgcaatttgctgaccacaccaaagtttactgtggcctgggactgggtacccaagaggcctgctgtttgcacaatgaccaaatggcaggaggttgacgagatgctccgggccgaatatggaggatcctttagattctcttctgacgctatcagtaccaccttcaccacaaatctgactcagtactctctgtctcgcgtagatctgggagactgtatcggtagggacgcacgcgaggctatagatcggatgttcgcccggaaatacaacgccacccacattaaagtggggcagccccagtattacttggctactgggggcttccttatcgcttatcagcctctgctctcaaataccctggcggagctttatgtacgcgagtatatgagggagcaggacaggaagccacgcaacgctaccccagcacccctgagagaagcgccttctgccaacgcgagtgtggaacgaattaagaccacgtcttcaatcgaattcgctcggctccaatttacctacaaccacattcaacgccacgttaacgatatgctgggaaggattgcagttgcttggtgtgagctccagaaccacgaactgacactgtggaacgaggccagaaagcttaacccaaacgctattgcttccgcgacagttggaagaagagtgtctgcacgaatgctcggcgacgttatggctgttagtacctgtgtgcctgtggcccctgacaatgtaattgttcagaacagtatgagagtctcttctagacccggcacttgctactccaggccactggtctcttttcgctacgaggatcaggggcctttgatcgagggccagttgggagagaataacgaactgcgcctgaccagagacgctctggaaccctgtacagtcggccacagacgatattttatattcggcggcggttacgtatattttgaagagtatgcgtactcccaccaactgtccagagcagatgtgaccactgtgagcacttttatcgatctcaatatcactatgctggaggatcacgagtttgttccgttggaagtgtacactcggcacgagatcaaggacagtggcctgctcgattataccgaagtccagaggcgcaatcaactgcacgatctgagatttgccgatattgacacagtgattagggctgacgctaacgccgctatgtttgctggcctgtgtgcctttttcgagggaatgggtgatctcggaagagccgtaggcaaggtggttatgggagtcgtaggtggcgtcgttagtgccgtgtcaggggtgtctagctttatgtctaaccccttcggagctttggctgtgggtctcctggtacttgccggactggtggccgcattttttgcctttaggtacgtcctgcagctgcagaggaatccaatgaaggccctgtatccacttacaacaaaggaacttaaaacctccgatcctggaggagttggaggagaaggcgaagagggagcggaaggtggtgggtttgacgaggccaagttggctgaggcccgagagatgataaggtatatggctctcgtatctgcaatggagagaactgagcacaaagctcgcaagaagggaaccagtgccctgctgagcagcaaagtgacaaatatgtaatgagcgcgcagcgcttagacgtctcgcgatcgatgctagtgtgaaatagacatcagaattaagaaaaacgtagggtccaagtggttccccgttatggactcgctatctgtcaaccagatcttataccctgaagttcacctagatagcccgatagttaccaataagatagtagccatcctggagtatgctcgagtccctcacgcttacagcctggaggaccctacactgtgtcagaacatcaagcaccgcctaaaaaacggattttccaaccaaatgattataaacaatgtggaagttgggaatgtcatcaagtccaagcttaggagttatccggcccactctcatattccatatccaaattgtaatcaggatttatttaacatagaagacaaagagtcaacgaggaagatccgtgaactcctcaaaaaggggaattcgctgtactccaaagtcagtgataaggttttccaatgcttaagggacactaactcacggcttggcctaggctccgaattgagggaggacatcaaggagaaagttattaacttgggagtttacatgcacagctcccagtggtttgagccctttctgttttggtttacagtcaagactgagatgaggtcagtgattaaatcacaaacccatacttgccataggaggagacacacacctgtattcttcactggtagttcagttgagttgctaatctctcgtgaccttgttgctataatcagtaaagagtctcaacatgtatattacctgacatttgaactggttttgatgtattgtgatgtcatagaggggaggttaatgacagagaccgctatgactattgatgctaggtatacagagcttctaggaagagtcagatacatgtggaaactgatagatggtttcttccctgcactcgggaatccaacttatcaaattgtagccatgctggagcctctttcacttgcttacctgcagctgagggatataacagtagaactcagaggtgctttccttaaccactgctttactgaaatacatgatgttcttgaccaaaacgggttttctgatgaaggtacttatcatgagttaactgaagctctagattacattttcataactgatgacatacatctgacaggggagattttctcatttttcagaagtttcggccaccccagacttgaagcagtaacggctgctgaaaatgttaggaaatacatgaatcagcctaaagtcattgtgtatgagactctgatgaaaggtcatgccatattttgtggaatcataatcaacggctatcgtgacaggcacggaggcagttggccaccgctgaccctccccctgcatgctgcagacacaatccggaatgctcaagcttcaggtgaagggttaacacatgagcagtgcgttgataactggaaatcttttgctggagtgaaatttggctgctttatgcctcttagcctggatagtgatctgacaatgtacctaaaggacaaggcacttgctgctctccaaagggaatgggattcagtttacccgaaagagttcctgcgttacgaccctcccaagggaaccgggtcacggaggcttgtagatgttttccttaatgattcgagctttgacccatatgatgtgataatgtatgttgtaagtggagcttacctccatgaccctgagttcaacctgtcttacagcctgaaagaaaaggagatcaaggaaacaggtagactttttgctaaaatgacttacaaaatgagggcatgccaagtgattgctgaaaatctaatctcaaacgggattggcaaatattttaaggacaatgggatggccaaggatgagcacgatttgactaaggcactccacactctagctgtctcaggagtccccaaagatctcaaagaaagtcacaggggggggccagtcttaaaaacctactcccgaagcccagtccacacaagtaccaggaacgtgagagcagcaaaagggtttatagggttccctcaagtaattcggcaggaccaagacactgatcatccggagaatatggaagcttacgagacagtcagtgcatttatcacgactgatctcaagaagtactgccttaattggagatatgagaccatcagcttgtttgcacagaggctaaatgagatttacggattgccctcatttttccagtggctgcataagaggcttgagacctctgtcctgtatgtaagtgaccctcattgcccccccgaccttgacgcccatatcccgttatataaagtccccaatgatcaaatcttcattaagtaccctatgggaggtatagaagggtattgtcagaagctgtggaccatcagcaccattccctatctatacctggctgcttatgagagcggagtaaggattgcttcgttagtgcaaggggacaatcagaccatagccgtaacaaaaagggtacccagcacatggccctacaaccttaagaaacgggaagctgctagagtaactagagattactttgtaattcttaggcaaaggctacatgatattggccatcacctcaaggcaaatgagacaattgtttcatcacatttttttgtctattcaaaaggaatatattatgatgggctacttgtgtcccaatcactcaagagcatcgcaagatgtgtattctggtcagagactatagttgatgaaacaagggcagcatgcagtaatattgctacaacaatggctaaaagcatcgagagaggttatgaccgttaccttgcatattccctgaacgtcctaaaagtgatacagcaaattctgatctctcttggcttcacaatcaattcaaccatgacccgggatgtagtcatacccctcctcacaaacaacgacctcttaataaggatggcactgttgcccgctcctattggggggatgaattatctgaatatgagcaggctgtttgtcagaaacatcggtgatccagtaacatcatcaattgctgatctcaagagaatgattctcgcctcactaatgcctgaagagaccctccatcaagtaatgacacaacaaccgggggactcttcattcctagactgggctagcgacccttactcagcaaatcttgtatgtgtccagagcatcactagactcctcaagaacataactgcaaggtttgtcctgatccatagtccaaacccaatgttaaaaggattattccatgatgacagtaaagaagaggacgagggactggcggcattcctcatggacaggcatattatagtacctagggcagctcatgaaatcctggatcatagtgtcacaggggcaagagagtctattgcaggcatgctggataccacaaaaggcttgattcgagccagcatgaggaagggggggttaacctctcgagtgataaccagattgtccaattatgactatgaacaattcagagcagggatggtgctattgacaggaagaaagagaaatgtcctcattgacaaagagtcatgttcagtgcagctggcgagagctctaagaagccatatgtgggcgaggctagctcgaggacggcctatttacggccttgaggtccctgatgtactagaatctatgcgaggccaccttattcggcgtcatgagacatgtgtcatctgcgagtgtggatcagtcaactacggatggttttttgtcccctcgggttgccaactggatgatattgacaaggaaacatcatccttgagagtcccatatattggttctaccactgatgagagaacagacatgaagcttgccttcgtaagagccccaagtcgatccttgcgatctgctgttagaatagcaacagtgtactcatgggcttacggtgatgatgatagctcttggaacgaagcctggttgttggctaggcaaagggccaatgtgagcctggaggagctaagggtgatcactcccatctcaacttcgactaatttagcgcataggttgagggatcgtagcactcaagtgaaatactcaggtacatcccttgtccgagtggcgaggtataccacaatctccaacgacaatctctcatttgtcatatcagataagaaggttgatactaactttatataccaacaaggaatgcttctagggttgggtgttttagaaacattgtttcgactcgagaaagataccggatcatctaacacggtattacatcttcacgtcgaaacagattgttgcgtgatcccgatgatagatcatcccaggatacccagctcccgcaagctagagctgagggcagagctatgtaccaacccattgatatatgataatgcacctttaattgacagagatgcaacaaggctatacacccagagccataggaggcaccttgtggaatttgttacatggtccacaccccaactatatcacattttagctaagtccacagcactatctatgattgacctggtaacaaaatttgagaaggaccatatgaatgaaatttcagctctcataggggatgacgatatcaatagtttcataactgagtttctgctcatagagccaagattattcactatctacttgggccagtgtgcggccatcaattgggcatttgatgtacattatcatagaccatcagggaaatatcagatgggtgagctgttgtcatcgttcctttctagaatgagcaaaggagtgtttaaggtgcttgtcaatgctctaagccacccaaagatctacaagaaattctggcattgtggtattatagagcctatccatggtccttcacttgatgctcaaaacttgcacacaactgtgtgcaacatggtttacacatgctatatgacctacctcgacctgttgttgaatgaagagttagaagagttcacatttctcttgtgtgaaagcgacgaggatgtagtaccggacagattcgacaacatccaggcaaaacacttatgtgttctggcagatttgtactgtcaaccagggacctgcccaccaattcgaggtctaagaccggtagagaaatgtgcagttctaaccgaccatatcaaggcagaggctatgttatctccagcaggatcttcgtggaacataaatccaattattgtagaccattactcatgctctctgacttatctccggcgaggatcgatcaaacagataagattgagagttgatccaggattcattttcgacgccctcgctgaggtaaatgtcagtcagccaaagatcggcagcaacaacatctcaaatatgagcatcaaggctttcagacccccacacgatgatgttgcaaaattgctcaaagatatcaacacaagcaagcacaatcttcccatttcagggggcaatctcgccaattatgaaatccatgctttccgcagaatcgggttgaactcatctgcttgctacaaagctgttgagatatcaacattaattaggagatgccttgagccaggggaggacggcttgttcttgggtgagggatcgggttctatgttgatcacttataaagagatacttaaactaaacaagtgcttctataatagtggggtttccgccaattctagatctggtcaaagggaattagcaccctatccctccgaagttggccttgtcgaacacagaatgggagtaggtaatattgtcaaagtgctctttaacgggaggcccgaagtcacgtgggtaggcagtgtagattgcttcaatttcatagttagtaatatccctacctctagtgtggggtttatccattcagatatagagaccttgcctgacaaagatactatagagaagctagaggaattggcagccatcttatcgatggctctgctcctgggcaaaataggatcaatactggtgattaagcttatgcctttcagcggggattttgttcagggatttataagttatgtagggtctcattatagagaagtgaaccttgtataccctagatacagcaacttcatctctactgaatcttatttggttatgacagatctcaaggctaaccggctaatgaatcctgaaaagattaagcagcagataattgaatcatctgtgaggacttcacctggacttataggtcacatcctatccattaagcaactaagctgcatacaagcaattgtgggagacgcagttagtagaggtgatatcaatcctactctgaaaaaacttacacctatagagcaggtgctgatcaattgcgggttggcaattaacggacctaagctgtgcaaagaattgatccaccatgatgttgcctcagggcaagatggattgcttaattctatactcatcctctacagggagttggcaagattcaaagacaaccaaagaagtcaacaagggatgttccacgcttaccccgtattggtaagtagcaggcaacgagaacttatatctaggatcacccgcaaattctgggggcacattcttctttactccgggaacaaaaagttgataaataagtttatccagaatctcaagtccggctatctgatactagacttacaccagaatatcttcgttaagaatctatccaagtcagagaaacagattattatgacggggggtttgaaacgtgagtgggtttttaaggtaacagtcaaggagaccaaagaatggtataagttagtcggatacagtgccctgattaaggactaattggttgaactccggaaccctaatcctgccctaggtggttaggcattatttgcaatatattaaagaaaactttgaaaatacgaagtttctattcccagctttgtctggt

SEQ ID NO: 102 - DNA, 18642 bp, synthetic construct
  source 1..18642: mol_type = other DNA
accaaacaaagttgggtaaggatagttcaatcaatgatcatcttctagtgcacttaggattcaagatcctattatcagggacaagagcaggattagggatatccgagatggccacacttttaaggagcttagcattgttcaaaagaaacaaggacaaaccacccattacatcaggatccggtggagccatcagaggaatcaaacacattattatagtaccaatccctggagattcctcaattaccactcgatccagacttctggaccggttggtgaggttaattggaaacccggatgtgagcgggcccaaactaacaggggcactaataggtatattatccttatttgtggagtctccaggtcaattgattcagaggatcaccgatgaccctgacgttagcataaggctgttagaggttgtccagagtgaccagtcacaatctggccttaccttcgcatcaagaggtaccaacatggaggatgaggcggaccaatacttttcacatgatgatccaattagtagtgatcaatccaggttcggatggttcgggaacaaggaaatctcagatattgaagtgcaagaccctgagggattcaacatgattctgggtaccatcctagcccaaatttgggtcttgctcgcaaaggcggttacggccccagacacggcagctgattcggagctaagaaggtggataaagtacacccaacaaagaagggtagttggtgaatttagattggagagaaaatggttggatgtggtgaggaacaggattgccgaggacctctccttacgccgattcatggtcgctctaatcctggatatcaagagaacacccggaaacaaacccaggattgctgaaatgatatgtgacattgatacatatatcgtagaggcaggattagccagttttatcctgactattaagtttgggatagaaactatgtatcctgctcttggactgcatgaatttgctggtgagttatccacacttgagtccttgatgaacctttaccagcaaatgggggaaactgcaccctacatggtaatcctggagaactcaattcagaacaagttcagtgcaggatcataccctctgctctggagctatgccatgggagtaggagtggaacttgaaaactccatgggaggtttgaactttggccgatcttactttgatccagcatattttagattagggcaagagatggtaaggaggtcagctggaaaggtcagttccacattggcatctgaactcggtatcactgccgaggatgcaaggcttgtttcagagattgcaatgcatactactgaggacaagatcagtagagcggttggacccagacaagcccaagtatcatttctacacggtgatcaaagtgagaatgagctaccgagattggggggcaaggaagataggagggtcaaacagagtcgaggagaagccagggagagctacagagaaaccgggcccagcagagcaagtgatgcgagagctgcccatcttccaaccggcacacccctagacattgacactgcaacggagtccagccaagatccgcaggacagtcgaaggtcagctgacgccctgcttaggctgcaagccatggcaggaatctcggaagaacaaggctcagacacggacacccctatagtgtacaatgacagaaatcttctagactaggtgcgagaggccgagggccagaacaacatccgcctaccatccatcattgttataaaaaacttaggaaccaggtccacacagccgccagcccatcaaccatccactcccacgattggagccaatggcagaagagcaggcacgccatgtcaaaaacggactggaatgcatccgggctctcaaggccgagcccatcggctcactggccatcgaggaagctatggcagcatggtcagaaatatcagacaacccaggacaggagcgagccacctgcagggaagagaaggcaggcagttcgggtctcagcaaaccatgcctctcagcaattggatcaactgaaggcggtgcacctcgcatccgcggtcagggacctggagagagcgatgacgacgctgaaactttgggaatccccccaagaaatctccaggcatcaagcactgggttacagtgttattacgtttatgatcacagcggtgaagcggttaagggaatccaagatgctgactctatcatggttcaatcaggccttgatggtgatagcaccctctcaggaggagacaatgaatctgaaaacagcgatgtggatattggcgaacctgataccgagggatatgctatcactgaccggggatctgctcccatctctatggggttcagggcttctgatgttgaaactgcagaaggaggggagatccacgagctcctgagactccaatccagaggcaacaactttccgaagcttgggaaaactctcaatgttcctccgcccccggaccccggtagggccagcacttccgggacacccattaaaaagggcacagacgcgagattagcctcatttggaacggagatcgcgtctttattgacaggtggtgcaacccaatgtgctcgaaagtcaccctcggaaccatcagggccaggtgcacctgcggggaatgtccccgagtgtgtgagcaatgccgcactgatacaggagtggacacccgaatctggtaccacaatctccccgagatcccagaataatgaagaagggggagactattatgatgatgagctgttctctgatgtccaagatattaaaacagccttggccaaaatacacgaggataatcagaagataatctccaagctagaatcactgctgttattgaagggagaagttgagtcaattaagaagcagatcaacaggcaaaatatcagcatatccaccctggaaggacacctctcaagcatcatgatcgccattcctggacttgggaaggatcccaacgaccccactgcagatgtcgaaatcaatcccgacttgaaacccatcataggcagagattcaggccgagcactggccgaagttctcaagaaacccgttgccagccgacaactccaaggaatgacaaatggacggaccagttccagaggacagctgctgaaggaatttcagctaaagccgatcgggaaaaagatgagctcagccgtcgggtttgttcctgacaccggccctgcatcacgcagtgtaatccgctccattataaaatccagccggctagaggaggatcggaagcgttacctgatgactctccttgatgatatcaaaggagccaatgatcttgccaagttccaccagatgctgatgaagataataatgaagtagctacagctcaacttacctgccaaccccatgccagtcgacccaactagtacaacctaaatccattataaaaaacttaggagcaaagtgattgcctcccaaggtccacaatgacagagacctacgacttcgacaagtcggcatgggacatcaaagggtcgatcgctccgatacaacccaccacctacagtgatggcaggctggtgccccaggtcagagtcatagatcctggtctaggcgacaggaaggatgaatgctttatgtacatgtttctgctgggggttgttgaggacagcgattccctagggcctccaatcgggcgagcatttgggttcctgcccttaggtgttggcagatccacagcaaagcccgaaaaactcctcaaagaggccactgagcttgacatagttgttagacgtacagcagggctcaatgaaaaactggtgttctacaacaacaccccactaactctcctcacaccttggagaaaggtcctaacaacagggagtgtcttcaacgcaaaccaagtgtgcaatgcggttaatctgataccgctcgataccccgcagaggttccgtgttgtttatatgagcatcacccgtctttcggataacgggtattacaccgttcctagaagaatgctggaattcagatcggtcaatgcagtggccttcaacctgctggtgacccttaggattgacaaggcgataggccctgggaagatcatcgacaatacagagcaacttcctgaggcaacatttatggtccacatcgggaacttcaggagaaagaagagtgaagtctactctgccgattattgcaaaatgaaaatcgaaaagatgggcctggtttttgcacttggtgggatagggggcaccagtcttcacattagaagcacaggcaaaatgagcaagactctccatgcacaactcgggttcaagaagaccttatgttacccgctgatggatatcaatgaagaccttaatcgattactctggaggagcagatgcaagatagtaagaatccaggcagttttgcagccatcagttcctcaagaattccgcatttacgacgacgtgatcataaatgatgaccaaggactattcaaagttctgtagaccgtagtgcccagcaatgcccgaaaacgacccccctcacaatgacagccagaaggcccggacaaaaaagccccctccgaaagactccacggaccaagcgagaggccagccagcagccgacggcaagcgcgaacaccaggcggccccagcacagaacagccctgacacaaggccaccaccagccaccccaatctgcatcctcctcgtgggacccccgaggaccaacccccaaggctgcccccgatccaaaccaccaaccgcatccccaccacccccgggaaagaaacccccagcaattggaaggcccctccccctcttcctcaacacaagaactccacaaccgaaccgcacaagcgaccgaggtgacccaaccgcaggcatccgactccctagacagatcctctctccccggcaaactaaacaaaacttagggccaaggaacatacacacccaacagaacccagaccccggcccacggcgccgcgcccccaacccccgacaaccagagggagcccccaaccaatcccgccggctcccccggtgcccacaggcagggacaccaacccccgaacagacccagcacccaaccatcgacaatccaagacgggggggcccccccaaaaaaaggcccccaggggccgacagccagcaccgcgaggaagcccacccaccccacacacgaccacggcaaccaaaccagaacccagaccaccctgggccaccagctcccagactcggccatcaccccgcagaaaggaaaggccacaacccgcgcaccccagccccgatccggcggggagccacccaacccgaaccagcacccaagagcgatccccgaaggacccccgaaccgcaaaggacatcagtatcccacagcctctccaagtcccccggtctcctcctcttctcgaagggaccaaaagatcaatccaccacacccgacgacactcaactccccacccctaaaggagacaccgggaatcccagaatcaagactcatccaatgtccatcatgggtctcaaggtgaacgtctctgccatattcatggcagtactgttaactctccaaacacccaccggtcaaatccattggggcaatctctctaagataggggtggtaggaataggaagtgcaagctacaaagttatgactcgttccagccatcaatcattagtcataaaattaatgcccaatataactctcctcaataactgcacgagggtagagattgcagaatacaggagactactgagaacagttttggaaccaattagagatgcacttaatgcaatgacccagaatataagaccggttcagagtgtagcttcaagtaggagacacaagagatttgcgggagtagtcctggcaggtgcggccctaggcgttgccacagctgctcagataacagccggcattgcacttcaccagtccatgctgaactctcaagccatcgacaatctgagagcgagcctggaaactactaatcaggcaattgagacaatcagacaagcagggcaggagatgatattggctgttcagggtgtccaagactacatcaataatgagctgataccgtctatgaaccaactatcttgtgatttaatcggccagaagctcgggctcaaattgctcagatactatacagaaatcctgtcattatttggccccagtttacgggaccccatatctgcggagatatctatccaggctttgagctatgcgcttggaggagacatcaataaggtgttagaaaagctcggatacagtggaggtgatttactgggcatcttagagagcggaggaataaaggcccggataactcacgtcgacacagagtcctacttcattgtcctcagtatagcctatccgacgctgtccgagattaagggggtgattgtccaccggctagagggggtctcgtacaacataggctctcaagagtggtataccactgtgcccaagtatgttgcaacccaagggtaccttatctcgaattttgatgagtcatcgtgtactttcatgccagaggggactgtgtgcagccaaaatgccttgtacccgatgagtcctctgctccaagaatgcctccgggggtacaccaagtcctgtgctcgtacactcgtatccgggtcttttgggaaccggttcattttatcacaagggaacctaatagccaattgtgcatcaatcctttgcaagtgttacacaacaggaacgatcattaatcaagaccctgacaagatcctaacatacattgctgccgatcactgcccggtagtcgaggtgaacggcgtgaccatccaagtcgggagcaggaggtatccagacgctgtgtacttgcacagaattgacctcggtcctcccatatcattggagaggttggacgtagggacaaatctggggaatgcaattgctaagttggaggatgccaaggaattgttggagtcatcggaccagatattgaggagtatgaaaggtttatcgagcactagcatagtctacatcctgattgcagtgtgtcttggagggttgatagggatccccgctttaatatgttgctgcagggggcgttgtaacaaaaagggagaacaagttggtatgtcaagaccaggcctaaagcctgatcttacgggaacatcaaaatcctatgtaaggtcgctctgatcctctacaactcttgaaacacaaatgtcccacaagtctcctcttcgtcatcaagcaaccaccgcacccagcatcaagcccacctgaaattatctccggcttccctctggccgaacaatatcggtagttaatcaaaacttagggtgcaagatcatccacaatgtcaccacaacgagaccggataaatgccttctacaaagataacccccatcccaagggaagtaggatagtcattaacagagaacatcttatgattgatagaccttatgttttgctggctgttctgtttgtcatgtttctgagcttgatcgggttgctagccattgcaggcattagacttcatcgggcagccatctacaccgcagagatccataaaagcctcagcaccaatctagatgtaactaactcaatcgagcatcaggtcaaggacgtgctgacaccactcttcaaaatcatcggtgatgaagtgggcctgaggacacctcagagattcactgacctagtgaaattaatctctgacaagattaaattccttaatccggatagggagtacgacttcagagatctcacttggtgtatcaacccgccagagagaatcaaattggattatgatcaatactgtgcagatgtggctgctgaagagctcatgaatgcattggtgaactcaactctactggagaccagaacaaccaatcagttcctagctgtctcaaagggaaactgctcagggcccactacaatcagaggtcaattctcaaacatgtcgctgtccctgttagacttgtatttaggtcgaggttacaatgtgtcatctatagtcactatgacatcccagggaatgtatgggggaacttacctagtggaaaagcctaatctgagcagcaaaaggtcagagttgtcacaactgagcatgtaccgagtgtttgaagtaggtgttatcagaaatccgggtttgggggctccggtgttccatatgacaaactatcttgagcaaccagtcagtaatgatctcagcaactgtatggtggctttgggggagctcaaactcgcagccctttgtcacggggaagattctatcacaattccctatcagggatcagggaaaggtgtcagcttccagctcgtcaagctaggtgtctggaaatccccaaccgacatgcaatcctgggtccccttatcaacggatgatccagtgatagacaggctttacctctcatctcacagaggtgttatcgctgacaatcaagcaaaatgggctgtcccgacaacacgaacagatgacaagttgcgaatggagacatgcttccaacaggcgtgtaagggtaaaatccaagcactctgcgagaatcccgagtgggcaccattgaaggataacaggattccttcatacggggtcttgtctgttgatctgagtctgacagttgagcttaaaatcaaaattgcttcgggattcgggccattgatcacacacggttcagggatggacctatacaaatccaaccacaacaatgtgtattggctgactatcccgccaatgaagaacctagccttaggtgtaatcaacacattggagtggataccgagattcaaggttagtccctacctcttcactgtcccaattaaggaagcaggcgaagactgccatgccccaacatacctacctgcggaggtggatggtgatgtcaaactcagttccaatctggtgattctacctggtcaagatctccaatatgttttggcaacctacgatacttccagggttgaacatgctgtggtttattacgtttacagcccaagccgctcattttcttacttttatccttttaggttgcctataaagggggtccccatcgaattacaagtggaatgcttcacatgggaccaaaaactctggtgccgtcacttctgtgtgcttgcggactcagaatctggtggacatatcactcactctgggatggtgggcatgggagtcagctgcacagtcacccgggaagatggaaccaatcgcagatagggctgctagtgaaccaatcacatgatgtcacccagacatcaggcatacccactagtctaccctccatcattgttataaaaaacttaggaaccaggtccacacagccgccagcccatcaacgcgtacggccaccatgagaggcggaggccttgtttgtgctttggtggttggtgcacttgtggccgcagtagcttcagctgctccagccgcacctagagcttctggtggagttgctgctactgttgcagctaacggcggacctgcctcacaaccaccccctgttccctcccctgcaactaccaaagcccggaagaggaagactaaaaagccacctaagagaccagaggccacaccaccacctgacgctaacgcaaccgttgcagctgggcacgcgaccttgagggctcacctgcgagagataaaagtcgaaaacgccgacgctcagttctacgtctgccctccacctaccggagcaactgtagttcaatttgaacagccacggaggtgcccgacaagaccagaaggacagaattacaccgaaggaatagccgtggtctttaaagagaatatcgccccttacaagttcaaggctacaatgtactacaaggacgtgaccgtctcacaggtgtggtttgggcacagatattcacagtttatgggaatcttcgaagatagagccccggtgcccttcgaagaggtgatcgataagataaacgctaagggcgtgtgcagatccaccgccaagtatgtgcgaaacaatatggaaactaccgctttccaccgagacgatcacgagaccgatatggagctgaagcctgccaaagtagccacgcgaacctcccgcggctggcacactaccgatctgaagtataaccctagccgcgttgaagcgttccacaggtacggtaccacagtaaactgtatcgtggaggaagttgacgctcgcagcgtgtacccctacgacgaattcgtgctggccaccggcgatttcgtatatatgtcacctttctacggatatcgcgagggcagccacacggaacacacctcttacgctgccgatcggttcaagcaagtcgacggtttttacgctagagacctgaccaccaaggcacgggcaacctcccctacaactaggaaccttcttactaccccaaaatttaccgtagcttgggactgggtgcctaagaggccagcagtctgcactatgactaagtggcaagaagtggacgaaatgctgagagctgagtacggcgggagttttaggttctcttccgacgctatttccaccacctttaccactaatctgactcaatatagtctgtctcgagtggacctgggcgattgtattggtcgagacgcacgcgaagctattgaccgaatgtttgcccgcaaatacaacgctacccacataaaggtaggccagcctcagtattacctggctactggaggctttctgattgcttaccagcccttgcttagtaatacccttgccgagctctacgttagagagtatatgcgcgagcaggatcgcaaacctcggaacgctacacctgcaccccttcgcgaagctccctctgcaaacgcctccgtagaacggatcaagaccacctcctctatcgagtttgcccggctccagtttacctacaatcacatccagcgacacgtgaacgatatgctcggaaggatcgcagtcgcgtggtgtgaactgcagaaccacgagctgactctgtggaacgaagcccggaaactgaatcctaacgctatcgcttctgccaccgtagggcgaagggtttctgctaggatgctcggtgacgtgatggccgtctccacttgtgttcctgtagctcccgacaacgtgatcgtgcagaattctatgcgagtaagcagtaggccaggtacctgctattcccgacctctggttagcttccggtacgaggaccaggggcctctgatcgaaggacagctcggagagaacaatgaattgagactgaccagagacgcactggagccgtgtactgtcggccacaggcgatattttatctttggaggggggtacgtctatttcgaggagtatgcctactcccaccaattgagcagggctgacgttacaacagtttccacgtttgctgacttgaatatcacgatgctcgaagacgcagaggcagtgcctctcgaggtttacacacgacacgagattaaagatagcgggctgctggactatactgaagtgcagagacgcaaccagctccacgacttgaggtttgctgatattgacaccgtgatcagggctgacgccaacgctgctatgttcgctggcttgtgtgctttcttcgagggaatgggtgacctgggcagagccgtgggtaaggtcgtaatgggcgtcgtgggcggagtagtaagtgccgtctccggagtatcaagctttatgtcaaaccccttcggcgctctggcggttggtcttctcgttttggcaggtcttgtagccgccttcttcgctttccgctatgtgctgcagctccaacggaatcctatgaaagctctgtaccccctgacaactaaggagctgaaaacttccgatcctggtggtgtaggcggtgaaggtgaagaaggagcagagggggggggctttgatgaagccaagctcgccgaagcacgcgaaatgattagatatatggccctggtgtctgctatggagagaacagaacacaaagctagaaagaaaggcacctctgccctgctctcttctaaggtcacaaatatgtaatgagcgcgcagcgcttagacgtctcgcgatcgatgctagtgtgaaatagacatcagaattaagaaaaacgtagggtccaagtggttccccgttatggactcgctatctgtcaaccagatcttataccctgaagttcacctagatagcccgatagttaccaataagatagtagccatcctggagtatgctcgagtccctcacgcttacagcctggaggaccctacactgtgtcagaacatcaagcaccgcctaaaaaacggattttccaaccaaatgattataaacaatgtggaagttgggaatgtcatcaagtccaagcttaggagttatccggcccactctcatattccatatccaaattgtaatcaggatttatttaacatagaagacaaagagtcaacgaggaagatccgtgaactcctcaaaaaggggaattcgctgtactccaaagtcagtgataaggttttccaatgcttaagggacactaactcacggcttggcctaggctccgaattgagggaggacatcaaggagaaagttattaacttgggagtttacatgcacagctcccagtggtttgagccctttctgttttggtttacagtcaagactgagatgaggtcagtgattaaatcacaaacccatacttgccataggaggagacacacacctgtattcttcactggtagttcagttgagttgctaatctctcgtgaccttgttgctataatcagtaaagagtctcaacatgtatattacctgacatttgaactggttttgatgtattgtgatgtcatagaggggaggttaatgacagagaccgctatgactattgatgctaggtatacagagcttctaggaagagtcagatacatgtggaaactgatagatggtttcttccctgcactcgggaatccaacttatcaaattgtagccatgctggagcctctttcacttgcttacctgcagctgagggatataacagtagaactcagaggtgctttccttaaccactgctttactgaaatacatgatgttcttgaccaaaacgggttttctgatgaaggtacttatcatgagttaactgaagctctagattacattttcataactgatgacatacatctgacaggggagattttctcatttttcagaagtttcggccaccccagacttgaagcagtaacggctgctgaaaatgttaggaaatacatgaatcagcctaaagtcattgtgtatgagactctgatgaaaggtcatgccatattttgtggaatcataatcaacggctatcgtgacaggcacggaggcagttggccaccgctgaccctccccctgcatgctgcagacacaatccggaatgctcaagcttcaggtgaagggttaacacatgagcagtgcgttgataactggaaatcttttgctggagtgaaatttggctgctttatgcctcttagcctggatagtgatctgacaatgtacctaaaggacaaggcacttgctgctctccaaagggaatgggattcagtttacccgaaagagttcctgcgttacgaccctcccaagggaaccgggtcacggaggcttgtagatgttttccttaatgattcgagctttgacccatatgatgtgataatgtatgttgtaagtggagcttacctccatgaccctgagttcaacctgtcttacagcctgaaagaaaaggagatcaaggaaacaggtagactttttgctaaaatgacttacaaaatgagggcatgccaagtgattgctgaaaatctaatctcaaacgggattggcaaatattttaaggacaatgggatggccaaggatgagcacgatttgactaaggcactccacactctagctgtctcaggagtccccaaagatctcaaagaaagtcacaggggggggccagtcttaaaaacctactcccgaagcccagtccacacaagtaccaggaacgtgagagcagcaaaagggtttatagggttccctcaagtaattcggcaggaccaagacactgatcatccggagaatatggaagcttacgagacagtcagtgcatttatcacgactgatctcaagaagtactgccttaattggagatatgagaccatcagcttgtttgcacagaggctaaatgagatttacggattgccctcatttttccagtggctgcataagaggcttgagacctctgtcctgtatgtaagtgaccctcattgcccccccgaccttgacgcccatatcccgttatataaagtccccaatgatcaaatcttcattaagtaccctatgggaggtatagaagggtattgtcagaagctgtggaccatcagcaccattccctatctatacctggctgcttatgagagcggagtaaggattgcttcgttagtgcaaggggacaatcagaccatagccgtaacaaaaagggtacccagcacatggccctacaaccttaagaaacgggaagctgctagagtaactagagattactttgtaattcttaggcaaaggctacatgatattggccatcacctcaaggcaaatgagacaattgtttcatcacatttttttgtctattcaaaaggaatatattatgatgggctacttgtgtcccaatcactcaagagcatcgcaagatgtgtattctggtcagagactatagttgatgaaacaagggcagcatgcagtaatattgctacaacaatggctaaaagcatcgagagaggttatgaccgttaccttgcatattccctgaacgtcctaaaagtgatacagcaaattctgatctctcttggcttcacaatcaattcaaccatgacccgggatgtagtcatacccctcctcacaaacaacgacctcttaataaggatggcactgttgcccgctcctattggggggatgaattatctgaatatgagcaggctgtttgtcagaaacatcggtgatccagtaacatcatcaattgctgatctcaagagaatgattctcgcctcactaatgcctgaagagaccctccatcaagtaatgacacaacaaccgggggactcttcattcctagactgggctagcgacccttactcagcaaatcttgtatgtgtccagagcatcactagactcctcaagaacataactgcaaggtttgtcctgatccatagtccaaacccaatgttaaaaggattattccatgatgacagtaaagaagaggacgagggactggcggcattcctcatggacaggcatattatagtacctagggcagctcatgaaatcctggatcatagtgtcacaggggcaagagagtctattgcaggcatgctggataccacaaaaggcttgattcgagccagcatgaggaagggggggttaacctctcgagtgataaccagattgtccaattatgactatgaacaattcagagcagggatggtgctattgacaggaagaaagagaaatgtcctcattgacaaagagtcatgttcagtgcagctggcgagagctctaagaagccatatgtgggcgaggctagctcgaggacggcctatttacggccttgaggtccctgatgtactagaatctatgcgaggccaccttattcggcgtcatgagacatgtgtcatctgcgagtgtggatcagtcaactacggatggttttttgtcccctcgggttgccaactggatgatattgacaaggaaacatcatccttgagagtcccatatattggttctaccactgatgagagaacagacatgaagcttgccttcgtaagagccccaagtcgatccttgcgatctgctgttagaatagcaacagtgtactcatgggcttacggtgatgatgatagctcttggaacgaagcctggttgttggctaggcaaagggccaatgtgagcctggaggagctaagggtgatcactcccatctcaacttcgactaatttagcgcataggttgagggatcgtagcactcaagtgaaatactcaggtacatcccttgtccgagtggcgaggtataccacaatctccaacgacaatctctcatttgtcatatcagataagaaggttgatactaactttatataccaacaaggaatgcttctagggttgggtgttttagaaacattgtttcgactcgagaaagataccggatcatctaacacggtattacatcttcacgtcgaaacagattgttgcgtgatcccgatgatagatcatcccaggatacccagctcccgcaagctagagctgagggcagagctatgtaccaacccattgatatatgataatgcacctttaattgacagagatgcaacaaggctatacacccagagccataggaggcaccttgtggaatttgttacatggtccacaccccaactatatcacattttagctaagtccacagcactatctatgattgacctggtaacaaaatttgagaaggaccatatgaatgaaatttcagctctcataggggatgacgatatcaatagtttcataactgagtttctgctcatagagccaagattattcactatctacttgggccagtgtgcggccatcaattgggcatttgatgtacattatcatagaccatcagggaaatatcagatgggtgagctgttgtcatcgttcctttctagaatgagcaaaggagtgtttaaggtgcttgtcaatgctctaagccacccaaagatctacaagaaattctggcattgtggtattatagagcctatccatggtccttcacttgatgctcaaaacttgcacacaactgtgtgcaacatggtttacacatgctatatgacctacctcgacctgttgttgaatgaagagttagaagagttcacatttctcttgtgtgaaagcgacgaggatgtagtaccggacagattcgacaacatccaggcaaaacacttatgtgttctggcagatttgtactgtcaaccagggacctgcccaccaattcgaggtctaagaccggtagagaaatgtgcagttctaaccgaccatatcaaggcagaggctatgttatctccagcaggatcttcgtggaacataaatccaattattgtagaccattactcatgctctctgacttatctccggcgaggatcgatcaaacagataagattgagagttgatccaggattcattttcgacgccctcgctgaggtaaatgtcagtcagccaaagatcggcagcaacaacatctcaaatatgagcatcaaggctttcagacccccacacgatgatgttgcaaaattgctcaaagatatcaacacaagcaagcacaatcttcccatttcagggggcaatctcgccaattatgaaatccatgctttccgcagaatcgggttgaactcatctgcttgctacaaagctgttgagatatcaacattaattaggagatgccttgagccaggggaggacggcttgttcttgggtgagggatcgggttctatgttgatcacttataaagagatacttaaactaaacaagtgcttctataatagtggggtttccgccaattctagatctggtcaaagggaattagcaccctatccctccgaagttggccttgtcgaacacagaatgggagtaggtaatattgtcaaagtgctctttaacgggaggcccgaagtcacgtgggtaggcagtgtagattgcttcaatttcatagttagtaatatccctacctctagtgtggggtttatccattcagatatagagaccttgcctgacaaagatactatagagaagctagaggaattggcagccatcttatcgatggctctgctcctgggcaaaataggatcaatactggtgattaagcttatgcctttcagcggggattttgttcagggatttataagttatgtagggtctcattatagagaagtgaaccttgtataccctagatacagcaacttcatctctactgaatcttatttggttatgacagatctcaaggctaaccggctaatgaatcctgaaaagattaagcagcagataattgaatcatctgtgaggacttcacctggacttataggtcacatcctatccattaagcaactaagctgcatacaagcaattgtgggagacgcagttagtagaggtgatatcaatcctactctgaaaaaacttacacctatagagcaggtgctgatcaattgcgggttggcaattaacggacctaagctgtgcaaagaattgatccaccatgatgttgcctcagggcaagatggattgcttaattctatactcatcctctacagggagttggcaagattcaaagacaaccaaagaagtcaacaagggatgttccacgcttaccccgtattggtaagtagcaggcaacgagaacttatatctaggatcacccgcaaattctgggggcacattcttctttactccgggaacaaaaagttgataaataagtttatccagaatctcaagtccggctatctgatactagacttacaccagaatatcttcgttaagaatctatccaagtcagagaaacagattattatgacggggggtttgaaacgtgagtgggtttttaaggtaacagtcaaggagaccaaagaatggtataagttagtcggatacagtgccctgattaaggactaattggttgaactccggaaccctaatcctgccctaggtggttaggcattatttgcaatatattaaagaaaactttgaaaatacgaagtttctattcccagctttgtctggt

SEQ ID NO: 103 - DNA, 21444 bp, synthetic construct; identical to SEQ ID NO: 72
  source 1..21444: mol_type = other DNA
